United States Patent Application Publication US 2006/0194265 A1 - sequence listing, part 9

SEQ ID NO: 1277 - DNA, 408438 bp, Homo sapiens
tttaagtctcagtttcctcatttgtaaaattgagttcacagtaatagttatttcataagatttttttcgagaattaagtaaaaatttaaaggatttgttgcataaaagccccttatagtatctagtataaaattaagaacccaataaatattaaccattatttttattgatgatggtggtggaggtggtgtctagtatgacccctcatcctcattctaccctactgaattgcagaaaggccttttacatataacccaattgcactgttcacttccccacctcaaacttactgcttgcccaattgaacttaactttattcagtttagattgggtcatttttccattattctgaggattgttagaatactgaccaagaattttatgcaaaagtgaagtctcagtgtccatttatagaggatgaactacaaccaaaaaacatagagagggataagaagactccctcctgctgtgatcagaacaattaaatggctttgtagaatgtggagtatttaaaatcttataattttgcaggtgaatatgggaactccctcaactaatgtgctttggggtgtaagtaacagaaaacctgactcaaatgggctttggccagtaggagctgtattggctcatattgctggtggtctaaggtggggtggcttccgggttgattgaatctggggctccctctccatttcctgtgattttcttggccctgctctcctccatgtggcaggcttatcctcagctggcagtgatgtggtggcagcggtttcacagtttgcatctgtgcagcacactgtccagaggcagagaggggccacttctttttctagccttcccttaaaagctgggagattttccctccaaaaccctagtaaatgttaccttatacttcattggctttaaatgagtcacatgccttttccttaactaatcactggcaaagggatgtggttaccttgactggattagtctaattagaacctgctatggagctggagcccatcccccaaactgtacggacggtgcacaaggttgggggatggaacgatcttgaggaggtaaacataatgcctactacagttttcctttttagatcattggagagatgtgggcactttcaattggattgtaattgttggtctaatcttacaagtgccttgtgtcttattgcagaacgtcagggaacacctgtctgagttgtgcacctggaattgccaacatcgtgctcagtatgcatttattgagctaaaaatccttcaggccacattatctctagaaatgtgaattttgttctcaatgaattctttggcttaaaaagcaggttaattataacataattgttggtaatcatgtcgtaaaatatgtagtaaatgaccagaaagaaaaagcataaaacagaagtcagagggcacagagaagagagtggaatgaagaaaagatcctaaaagctttcagagatcagacacgctttggaggcacaggtatgcccttcttccatttccatcagctcctgagtatccagatcctaacccaagatcttcccactcattgtcaagcttctttgaacttcccacgtgtttgatcacagctgaggtgtgcaaaaaggctgggttctgagataggtcagatggaatctgaccagaaggggccaggcctggcagccagatggggaagagctcaggccaccagcacagaggttcacaactggccaacatgtgaggcactcgagggctgtgaggtgtcctccatgaagaccacattgtaggccccatatgtccagctttgggctttgttcttgtttccctaggtggcaactcagactggctctcccagtccaaaccgtgttccctacttagagctgcagcatgaggggttgcccctgggctagtacctttgaaagcctgtgctgctgttatgaccctactcagagaggagatttaatctgccagcacaaacagtgctgtccataactttactgcagtaccaacgtactccctttaaaagacaatcacctccaagaaaatcacttcaggtaatcttggtctgagtgggtgggagggatattacgaggctctaattggagatccccagtgctactgggattgatacttgagaaatgttttgatagaaaagaggctattggagaagattttgcagcattgcagatgccattgtctgagcctgatgctgcagtggtttggacaaacacccttcagggactatatagaggcttctggaagttagcccctagcccttctctatcccagtctagataactggcatttcaatttgtttctccaagtccaaggggttgtagcattttgttttctttccagttaactattactgactcctagtgacttttccttccagagactgtccaaggagtagttttctgtccttagttttctacctcccttaagttccttagaaaagtatgggaaactgcaaaatatcttctttcctccgtacctgtttacctttctccctctctcctcccctcactccttccttttataagcacttactgaatgcttacaattactacatttctgctctccagtggttaagcagggccaggtgactgaattctggctaatggaatgtggagagttgatatacaccacttctaggccttgcctgtaagcctcatgcaaaatctttcaagtgcttagtctttttctttgtctcccagctggagagaaaaagagtttaggaagactctgaggcccagggcttgggtgttagcaggaccaggtgcctgtttttgtaaataaaaaattttattgaaatacagccgtatccatttgtttatatattgtctatgctgctttcacactgaaaaggcagagttgtgtagttgcaactaagatcttatggcctgcaatggctaaaatatttactatctaaccctttaagaaaaaaatttgcttaacccttccccaggggatggcagagccactgaatgaaaggaacctggttccctgaatgactatgtagagcagagtctctctttcccatcttccaggccaacttgcatcattagacagtgatattggagagaaataagtttttattttattaagctatagatattttgaggttgtttaatacaaacataagttattttacataataaaaatggtagctaatatttattgggcattttttatggccaggtgctgttctatgagcttctgtatttaattctcacaactttatgatgtatctacctttcttttttttctttttttgagatggagtctcgttctgtctcccaggctggagtgaagtggcgcgatctcggcttgctataacttctacctcctgggttcaagaaattctctgcctcagcctcctgagtagccgggattacaggcacctgccagcatgcccggttaatttttttgtctttttagtagagacagagtttcaccatcttggccaggctggtctcaaactcctgactttttgatccacccgcctcagcctcccaaagtggatgtatctactttacatgtatctacttaatctgtaaaatgatgtatgatcattttacagattaagatatgcaaggctatgtaatttgccgagggattcagttggtgagcgtggagttgggattcatacccagcttcagagcgtaggctcctaacttctatttttttgccccatatttacctaacttacagttccaagttcctccccagatactatgttgattcttatcacaggcttctgtagggcaggttatattattatcctcattgtttatgtgagaaaactgacctagagaagtcaagctaaaggttgcttgactagcaagtggcagaaatgtagcctgaacccagagcttctgataccagaatacggactctttcaactcctccgcagagactcagactgacttagtgcacactccatatttgaagctgtgttttccttgagtcttggtttacattcagaatgcaccagcctgttaaattgctgttggacattagcccatccttgaacagtcaccataacaacataggcacatggagaggaatgtggggtaggcaaaaactgatgccagtccaggggagaatagagctttgcagggagtgggggtgggtcagggaacacttcctgggtgtgttttgctatgttcttttcatgatatagactggaaatgattgagaaggacactgttctagtggcttttagcaacctgactcatccaggacaatacctcttaccaacttagcacaacctctcaggctgacacactgcttttaggacagtgtttgaagacatggttcctagggggaaagggtgtctattaacaatgtaggttcctgaacccacccaagatctactgcatgagaatctctgaagagacatccaggaatctgcatttttaaccagcaatgtagatggttctgatgtacattagagattgagaagtgcggtcttaggaagtcatggtaaatgaaaatcatgcccagcttttactcctccttttgcagtcaggtagcaggctggctcagctaagaaaaatccctagatgaatatttatttctgcacagggaatgtttcctctcagagtaggcgggtgagtatgctgagtaggtcattccctgccattcctattgctgggcaggaaacccattttactgtatcagttctctctcaagagaatcatttttagaattaactcaacacgatatataagttgtagagtatcatatctcaaaatttgtttccatcttataacttttaatttctaacaggtgggaattaggacatctttaccctcatccagcctatggcagacagagggtacagagccaagatagctcagggccagcttggggacacttgtatgcctaccactcacctcgtagtgttcatcagttccatttctgtccactatctcttagccaatgtgcttggtggtctatgcagtggagatttctttgctgaactcagaactttcagggaataaagatagtagacttagaaaagcatgagtttcattgacttgctggtgtatccacttctcacaaggtaagttggaggatgcacatgttctggaggaatcagaaagagagtggtggaggggtgggaataggatgggcatgcacccaaggaaaggaagatgaatgtcctcaatgtgacagactcatctttaagggtctgagaggcacagataagccaaaggggtgcatggaccattatttctaaagcagtaaaaaatagatgaattaagaagtaaaactcttgatagggtataaagggaaagatggtgcaaaggacataatatttcttcatggacaaagatcttgactttgactctggaagggtgacagggaagacaatttcagaagtaggctatgagctcgagtgtttttggcagtgcagggtgcttgtgtgggggtggaggaagagagcccttattctgccattccactgtgccctgacagggaagggaagggtttttctggggctgctggattacactaaacgctcttccaccccaggatccccataatttaaaatcacaccctctgctcattaaccaaacttagcaatgaagaataagaagagaagtaggtaggaagcaagggttagagtcagactggtgctctcaaagctttcattagctcgttcttgggcaagttttgcagagctcatcttataacttttaatttcgaagcaggccctcttctccctctcttcaggagtgttgagtgtgagctataggacagcaactttgctctcaggaagctgctcacctgggtccacccctcattctcttttgtagatctccatttcctatttttgccaggttctctgtagaacctgcttccatgggcgtaggctgaatgacaataatggagtccaagagacgcagatgaaagaccaaagtttacaggactttataaataaagttttatcagaacacagtcattcccattcatttacatattctctggctgctttcatgctacaacagcagcgtttaaatagttgcaacagagattgtgtggcacgcaaagctcaaaatatttattttctggtcctttgcaacagagattatatggcatgcaaagcttgaaatatttattttctggccctttgcagtgtttgccaatccttgctctagagagttttgtatgggcatttaaatgctacccttaagtaacatatatcacttccactcacaactcactggccaaaatggtcacatggccccactcaaccatagagggccaggaagtacatcctactgtgtgcccaagaaggggataatcagaatatttggcaaacagcactaatggtcaccataagcacctaatatgaattgaactcagtactaggtgctgggtatagaaagaagaacaagacaaaattgttgatctcaaggaatttaaggaatgccagaatttggggattggagggggaaggctaagtatagattcgagtgtcctttcctagaagatatagactggcttgtctgaattgcttgagatctcggcttggtgctagccagaactggggactgatcggcttggcaagcagtgggggcaacagaccctcctggtgaacatttgtatcaataatagaagggttgtttaacagaaattcttaaaggaaagatgagataatttcatattttgatattcataacataaagctggagctccgcagtgcatattattgctgttgtaattttggcaaagatgtgattcaaattggcaaagtgtctgggaagaggaaatcatgtaaggagagagggtgggatgggtcaggaaacagaggtggggagccaggtactggtggcctggtgagagctgggagggtggcccaggagcctttgtcacagacagacacgagggaaaggaggctgcagccagcagggcctgagaattcttggagttgctggagatgctaaggcctggggagggagtgggagcagcaggggaggggtgtgcgcgtgcatgtggtgagggagagacatttaaacatcgtaggaatgaaggataaatttaaaatccctcaaggggagttgagacagaatgacaacgtgaggaacgtgaatcactctttctagggacccacccagctgttggcatgatttggaatacattttcttctccttaccaagctcattctggactccttatcttccttctccctgatcccttgacctggccttggtggccaagtaccgagtgttggctaccatgtcctgggagcttcaagctcaaaagcattgaggccttagggtgtggtgctggtagggcaaggaagaccagtccagatgctggagatggagaaggggacgaatagagaaggtatcttagggctccaggggcgtccgagtctactgaatgctcccatcaggctttatcatgtatgcgctaagatcatcctctcatccagactttttgtttctatttattatcttagcataacgaggaggggggctgggagaggcatttatggattctgcttcatgtggtagagacactgtgatcaatatagtggagaaaaccataagctaggacttgaaatctgagttctctcccagctctgctttttattggcagtgtgatcctgggtggggctctctacctttgtggacctcagcatccataaaatgatatggttagatcattataattcctaaccattgaaatagtctttgtttttgtgacttgcaatttgacttgccgtccaacccagggaaggcggggtgggagatggtgtctggagggcaactttctgggaggatgccaccctgggggcccagtacagctcccaacacatagtgggtgctcaaccatccaacactggttgaatgatctggaggccagagttcctctgagcatgtagagcacgggacacttcttagatgccacctgtggtcactgagacgtgtggttgggaggaattctggttttgggctcctggctaggagggaggcaataagcaggtatcttgaaaaggtggtaagttcaggccctctcaagccacaaggactccccccagtacttagacctgctgtggggactagcaatgtgtgagtaacttttacgtctctcattaagttaaacctttgctaattggagcatgtcaagatctagtaccagccacccacctggagtgctgctttcacttgggcaggtccatgaggcgtaaaacagggaaaacacctcaatggctttggactcaacctttaggggtgtagtagtggaggaacagtgcacaaaggaggagagaggagtgaccagggaggcaggaagaatcctttggtttccctaaatcctctctcatgcacatgctcttccttttgcctgttttcctctcctgttcttcaactggcaaactctgtttaacccggctccagggtcctttccttcacaaagccctcctgaccaaccccagctgggctaggtgcccctcttttttttctttttttgggatggagtcttgttctgtcacccaggctggagtgcaatggtgcggtttcagctcactgcaacctctgcccaccgggttcaagcgattctcctgtctcagcctcccaagtagctgggattacaggcacacgccaccacacctggctaatttttgtatttttagtagagactaggtttcaccatgtcggccaggctggtctcaaactcctgacctcaagtgatctgctcgccttggtctcccaaagtgctgggattataggcgtgagccactgcgcccagccaggtgtgcctctcatgtgctcctctagcaatcaggcctacgccaatcatagcacattctgtgatgtggtcacaatcgatgttcttcctgcctcttccatgaggatgatgtggactaagtccagctcatgttgttgtgcctagtgcctggcacagtgccttgcacatggtaagttctcagtcaacgctgattgaatacgtacgtctttcagaggccaatctggttatgtcctccttggcatggaaaaggagaatgatgccaaggggagcagcaggggcatctgagtcacacgtggccccaggtcctgaggcaggcacaggcattaaaaaaggaggaaggaacctgcatacaggacccagttctcaagaagagttctccttaggctgggctcagaggctcatgcctgtaatcctagcactttgggaggctgagtgaggaggatcgcttgtgcccaggagttgagactagtctaggcaacacggggaaacgtcatctctacaaaaaataaaaaaattgctggatgtggtggtgtgtgcctgtggttccagttactcaggaggctgagacgggaggatcaccggaccctgggaggttgatgctgcagtgagccgtgattgcaccattgcactccagcctgggtgacagatcctatctcaaaaaaaaaaaaggagagaccaccttgtggcttggtgcccccaggcacgcacttgggaggcagggcagcaggtggtggtggcaatccccccagagtgggccctggggaaggggttagagggattcttctaccaaaaatgggagggaacagccagctagctgtccgaggtggggctgagatgtgcggccctcggagttctctccttattgcagcacctctaaaccttaccaacgcggcatatcattatttctttaatctgtgtcttctgcagtagactgtaagtttatgagggcaagaatccagtccactttgttaaattctggacacctgggggcccagcctggtccgccgcggatgctcctaatttcaacatcatttatcgagctccactgtgtgccagtttgtgggtcaggcccgggatgtagcactgagcaagccagaagccttggcctggaaggcaatgccattaacctctttctttctcttctctatttccctgtgaccttggccccattcttcctccctccctcccttccccactccttgtctctgccctctccctcccacagagcaatgttctgtgatggtgcccgagatgcgtggactgagcccagaccgcaggctgcccgagcccgccccctgcccggctgcggggagccctgagcccaggtccgcgggccgccgccaacgccacgtcctggccctgccggaagaagaggcatggcggccccagcagtgcgctctgctcgaggccgacgcctcggacgaggtgggcatgctgccggcttccccgcgcgccgcctctggcttcgacaacttcttccaggtgcaggagggcgagggccagggctgggagggcgccatggcactggaggcgggctccagccctttcctgccggtgagccccgaggtcatgaagcggcggcgcgggggcctcatcgagcagcgcgacatcatcaaggcccacgaggcgcacaagatgcagagcaccccgcaggcccggcgcaaggaatgggagtgagtatggcggggacgcgggggcgggcatggctggctgggcctgaggtcggggtgggttcctggagcggatgggccccgtgaggccgccctggagggtcgggagatgctttcgctgtgctgcgactaacgagaggctggaccctctggatgaggtcctcgtggtcagtccctgatctcaccacccggctgtaggcctcgtccagcctcactgaggcgttcagctgtcagatgtgggtgaatcagccttgcccccaaggctcacttgttttactaagagcctgtggagaaagaactggggtctgtttcattctctgagctttcctgaaagccagggagaatccttcacaacgtggatcatctatttcatctttacttcaggaactgcagctaaccctgcctttttaatatcctccttggatgaatgattacattttgggcacatctccagtggatggaggaaaatgtccaagatctgtgtggccactcctggctttatttctgctctgtttgtgtagggcaaaaggccaactttaattcacacctgttgagaattttggctttttcttcttaggagtcctaaattaaaggaagatgggatttcacttaattctctcggttgccccaggtttttgctccatagaaggactttgctttgtcctgtggatgccggagtttactcggcatgctggcatgccctgtggtctgtatgtcttcatctcttcttgctttagattgttgacttgctagatgtcatcaagtacaaagagattagtcacagatgtattttgatggtggtggtcgtggtgggatttacctacttggtttcagtgaatgttctggatgatacaagtaggggtaaatgagctgatctctgtttcataaggatgttaatgtttgttagttcgctcattcattcattcagtgagtccgaatgtatgccgggctcctgggattcagagaggagttgggcacagccagcattcaacaaatctcttggttgttcatctctcagcactattagtatttagagccttgcatacctgtctttaagtgccaggcaacattccaagcaccttacatatatccactcatgttaatcttcaccataactatgaggtaggtacagttattagccacatgtaaccaatgaggcacagagaagttaagtgactttctcaaggtcacgtggataacaaccgcattgttactgtgatttgatattaattagtaatttgaaccctggcagtctggttgtggaatccatgcctttaaccatgatggcacagtgcctttcattctaactctcaaagtacttctctcaacaacctattgagatgccatggtaagagcactggtgttggggtttggagacttgggtctaattcccagggtgacctaattagtggtgtgaccttgagtaagtcacctcatcatgacttcgaaagacaagtaggagggagtagacttcctttaaatacaatgcagctctgatagctggcctttcttcatatttagaagtactattttttaatgcacctccatcttatctttctaagaggaccctgaacaacttgagggctgagactgtcatgcacattgttcatgtcactcaatgcctatcatctggcctaacccaaaaaatcccacaatactcaatgaaaaactagctttaccatgactagcaatgtggaaataacttttatgtctctaagttaaactttactgattggaggatgtcaagatctagtaccagccacctacctggggtgctggcggggatgattgggagactgttttcacttgggcaggtccatgaagaggtaaaccagggtacacacatcaatggccttggggaatgtcagcctttaggggtgtggcagtggaggaagagcacatgaaggaggtgagaaggagtagaaggaggtgggagggtaaccagagggtatagggacaaagaagtaaggaaaatggtgtgttcagaaggaaggtcatcatctccatagaatgttgctgagaggtcaaataaaatgaagatagagaaggaaacactggctttggcaacacagagatgacctgaatgggagtagtttccacagggcgatggggtcagtagcccagttggagtgggttgaaaagaaaatgggaagtgatagagacagtgatgttgccccatccttctctgctccccaacactcacggcctcatcatggcttttcccctcaccacccaaattccttagcctcatggctctgtacatgccttaatttgatcttctccacacccctccccagttctacgaaccctaatgttactgagcaaagagggcttgctgctcggggcactagaagccaatactacagcactgggtttttgagaagagaagctttttattgcatgtcaattcacaaagagacgggatgtcaagcccaaatctgtctctctgtcctcgcttcaaggcagtattttcattagaaaaggttcaagggattagtaagtgattggtggagggaaaggggaggtctggaaagtccttggacatgctcagttatctcttcatgctacctcacaggtcgcatgtgaaaattcttgaggacttagtatgaaacatgtcatggaagttcaggctgtggtgtcagcaggcttgttctgcagacgccagtaggccaggccatcttggttccaaccgatgtcagccagttttttcttgatctcacgttgtggggaatttcagcatttctgcaagttgtttcttttcttatctgccattctgcaagctcaagaatatctgttagtcattggtttcttactctttggggcacagtttcagcttcagcttttcagcaggttgtttcttttcttatctgctatcctgtaagccaaagaatgtagtcattggcctctttaactctttggggcacggtttcactaatacactgtctggcactcatgtttcatcatcagcaaagtcctgttcatcctcctcatcttctctggaagtccccttcactctcttatttctgctggagcctccccccaggaatgcggcttgctctgcagctgcctcatgtgacagctgctttcccttccacgctgccttggaccctggagtctagagaagcaatttgctcctcactattgcttccagaccattactcccctctcctgtcctaaaaatgccagctgtggcgtgcatgtcatcagataataccacctactacccctcgttgccaccatctacaaactcccaagtcacttgcttcattccaggaagaatgggttagccctgggtttactgcctctcttccccacgtcttcagctgctggcagttcttagtgatttcagtatccatgtagatgacccttcctgcaccctgacctcttggttccttagccccttctgtttggtgactttgccttcttgcttcctgctgacagctcacctccatggtctgcctggacattgtcgtaactgcattactccataatctcggtttcaagcatcccactgtgtgatcaccccctcttttctctccactccctctagtgctcagttcccaagattctttaatcttactgcatccacaagacactgatcctattaccttttcactatccccttccccagtcatgtcaccatttcccatcttatcaaactgaactccatcataagcaccaaacatattttccagataaaatagtgacctttcacttgaagtctcctcctaccctctcaagctctttcttctaccaacttctaagatagaatgaatcatccacaaagggcaagaatgctggagctcaagttggtttctagtgtacttcatgcttcaccatcattataatctccttattttcaccctcaactttgttgtccctctgctgctttgttataccttgtctggcaagacttcagccctgctaaatcccactttcccctattcttcatgtacatatgggcaggtgaccatagctatagaaaaagtcacaaccacgccgattgacctcactgtgaattgatgactgccacctccagttggcccttagtcctgcccagaaatcttactacttttcccttttctattcactctcacactcctctagagattatttcacatgcttttcccttaactctcaaatcccatcatttcctgccagctcgctcctagctcatgactacaattgccttcctacttcactgggaaaatagcagcaatcaggagaggcatgtacaggctccatccactgcactgaccgcctgctgcatctggtccctggtaccaggcctttaccttctgttactgtggactgaccacccctcaagttccatgtggagtctgttgcccatgtagagaaaaatgagcccctttgtttattctgtctccatttttttttcttacaattttctctggaacccattccaatcaggtctttgtcccaggcaaacaaacagctgttgacatggtgacattggccttcccaaggcagaatccaatgggtgttccttcgtgtccatcttccttgacctagcagcaacatttgatcacttcctctttcttgaaactcttttgtccttattttttatattttatgtttttttagagacaggattttgccgtgttgcccagactgatctcaaactcttggcctcaagtaatcctcctgcctcagcctcctgagctaggagtacaggtgaaagtgttttgtcacatggcttttacgatacccactcttggttctcctcctatgttgtgggttgcttctcaatctcttgctagtttccacttccttttcccaatccttactaaacactggatgtcccagggcttggtcctcagcctgttctcttctcaccagtgcttacttcctagtgctcttgcccagtcccagacctttggttagcatcgtatactgctgacctctaaattggtgtctgtactcaggacctcttccctgaatttaagataccacccacttattcaccatctttacttgtacatccatcgacatctcaagctgaacatgtctaacatcaaaatattgatttctctccaaacctgcttctcttgtagttttctctttcattaaacctacattttttctgttgctggggccagaaatgttgaagtcattttgattctcacattgacactcaattcttgccaatccccagtgtctcccccctcaaaatgtatcagatcaccattcaccacctctgctgctgtctccctggtccaagcaccttttattatttttattccacacacgtatatgatactagatgcccagcactattctaggtactttataaatattaattaatttatccatgtaataattgattgaagctggtaccattattaccattattgtccccatttttgcacttgggggatagagagtttaagtcacttgcccaagatcataatgtcaaccacctcttaatgagcctccctgcctctgcccctccctgctagactctgtttccccaactgcagctaaagatccttactttttcttttttgattcacaaaggatttagaaaggtagaacaagtagtttctgtccaagagtcttaagaaatatttcatatcagtccttagctcagtgcatgatttccatcttctccctcttccccctgcccagccagcctcctaaagatgcatgaatgtctttggtttgatttcttcatctttccccttaactcattctgcactggctacactggtcccttgttatgccttgaatgtactcagacctcccacatcaggcctctgccttttgctggtccctttgcctagaatgcttttcccatttatcaggatggctcctctctcatttcatttaggtttctgctcagagagaacttcctgatcaccctatttaaatagcattcccccattgtcactctctttccctctttattttgctttatttttcatcatagcccttattgtttccccaacggacacacaaacacacacacatacatacaagcacagatattttgcactggagtgcaagcttcttgaaagcagggcctttgtcttaccttcagggtccaaaacagtgcctagtgtgcagttgactcacaataagtgtttgctgaaagaatgatgaagtaaacatattgaggggaattgatatccattctaatcagctaagttccagggaaggaggcagctgagttccctgtgtccactgtgtggttgtacaggttgctgactgcagagtcctccagttgaatagtcagcagtggaagtggggagtctgttctctgccccacttcagggctgcccaggatctgcatgcactttgtagagatggaaatttttcctcccttctgtctcctgcctttcagcttctcctgacttatgttctttagacaggatccctttggctctaggacaggggcagcctggtcctttcccagggcttggatttactgtagtgggaaatcaggcagggttctctgtgggcagccctgacagcatcttgctcctcccaaggccctgtccactgcttatacaggtgaaagcctgggacacataccaccagctttacaaatcctgtctcctagacactgagtcaggaccctggtgatagtgaaacagactagaaaccaacctgggaggtctcctgcattttttttttgtctttggctgggtaagccaaatgctgatgggagaaggagtactttaggtgatttcagatgaagcagattttcttgtacagaatgttgttttcctaagaacctatttaaaggtttcctcaggcccacttttcaggtgatgaggacctcttggttagcaccaagtgtttattgtgtactaagttttataactttagcaagtgggcatgtcacaatgttttactaatactttaatatagttctctccagcttaaaacatttttcatacatatgatctcatctgagcctcacaatgacctcatgaattagctgttattatttataatttacaggagagaaaaatgagctccgaagttagaggtggtactaggtcaaaaacctatgtcttgataatgactgccaccatttattgagcactggctatatggtaggtgatttgcatgtattatttattctaatggaaataataggtaccatgatgaagaacagaaacattttgtatggcactattattgcatatgggtctggaagaaaggaaattatgtgtaactttaaagtctgcgtaggttggtatgacttactctataaagagggagggggtatttccataatcatagtacttagcacactacattgtaattgcctgtttacatgtctgtgtcccccactagattgtaagcagagaagtctgtctgctccccattgtgtctcctttacttagtactgtgttgggcacataataggcactcagtagacatttgcagatgaaaaacaacaacaacaacagcaacaacatgatttttcatattgggaaactgaggcttgataaggttaagttacctgcccagtatcacagagccagtgaggattcactccaggtcctctaattccgaagcccatgtttgttctactgagccatcctactcactggtgtccctacagtaactggcacagcactgggtaaatgacgggaactcagttcatgcttgaattcttgcaatgctacttgtaaattgtgggcttgggcactttgtaacctccgcattttttgagtagaggagagaaataatacctaccttgcaagcctgttgcaaagtttgaccacatttattagatcatatagtctggtggggggtcctcaaaatgttgatgagcaccagggttattctgggcctcttctctgcctacagcctccctgggtgacctcaccaggtccacatatctgcagatgactctcaaatgtaaatttccaaagaacccttgactcttgaagccaaatgcttgtctggcatctctgcactgttgtctatctaatcagcttctaaaacataatgtggctagaacaaaactcctgatcctcttctgatcctgtctggcccctcatttttccttatctcagtaaatggcaccactatttctccagttgtccgagccaaatattctcattatcttttatttctctccatttttcctcacttctgatcagtggtaagccctgtcaataacatctcccaaacatatcccaagtccaaacacttctccatccccactgctaccaatctcttccaagccactatcctttggaccattgcaatggcctgctaacgtgtctttgcatctttgtttccctagaataagagaatgtgatctattgacacaacaggcagggacaatatgaactctttttgctggctcataaagccctatccgacctgagctttgcttaactcctggcctcatctactctctcccttgttccctgtgctcctgcccactcgccttttatttaggctatgcctgtttatgtctctaccctggctcctgccgttgcctggaatatttctccagatctcaacagggttggttcattcttgccatttggaccttagctcaaatgatacttcctcagagaggctgtccttcatcacacagtctaaaatagacacctggtcactgtgccatatcacctatgcagttgaccaccaacccccacaagaatgttggtgccgtgagatcagtgatttgactgcctcgttcactccatatccccagtgctgagggcaatgctgacatatgggccctcagtaattatttgtgaatgaatatttatgaatgttccgtaacagtggctatggttatagttacgatctatgtgttcacctggcctctgatagccctagccataccaaacggtctagtccaggaagctcaggacaccactggctctaggtctagaccagggtcagcccctggggtgtggagattcatgagctgtaaaacacaggttggttaacttacaggttgtatgagaactgtcctccttcaagctattgtttgatcaccacagagccatgtcttatttgactttgggtaagatatccaacctttgtgggcctcattttgctcttttgctagattgtggatgagtacagcaacctttttgaattgttatgaaggaaaaacagcatgtaaagtacttagtccgatgcttggttgtttttctccttgatgtctggttcctcaccttcaggagcctgtcacttgctatcacttatagtttaaccaaaacattagattgtgaatctaacaatagaagcctgcaacttcttgtctaccgagaaagtgtacaagaactgctaactcatgcccccatgcctagcaacatggctttctcaactttgaaaggattagagtcatccgttggtcttaggaaccaaaaacattgatgcaactccaaataaaagtagcaaacatgtatttttccactaccataataaccctaatccccttaatcttacccatcattactaccttagccaacccctataaaaaaggttcatatccaaattacgtaaaaacatctatcgcatgtgccttcatcatcagcctcatccctacaacaatgtttatatgtacagatcaagaagtcattatctcaaactgacaggcatcagaggtttgccgaagcccaaggtgcagaggttgtagttaggcttgggatcagctgtatacatcaacggaccacagcagcatgtgggagactacaggagggaatgcacagtgcctggcacaaggtcaacagtcagtgcatatgagccattattatgatcattattattattcatctggtctagctgcttcatttacaggtgaggaagctggggtcctgagagcctgggtgactgctggtgctttatgtgaaggtcagtggactgtggtgagtgacaaggtaggaggaaccagtcctgcaagtcccacccacttctgtctcatgtgccctgcagctatgctgacttagtaggggtgatcacattcaaacaacagtctcaccggcattcacaccgcattcagcatcagcaacatattctgtaaggcaacacctgtctcaaccttgaagctttatgggtgaatttaagggccattgggccaattttttttttttttttgctggccttttgaaaggcggccagcctcctgcagatctagtgagactaagtggagacctcagtccacatgctgccacctgctgccagcatcagacatcactcgggttgttagaatacaggaatctgtggaaccactattgccaaaagggtgcatggcagaatttgttcttatatatgagtgctttgttgaattatcggatattttaattttatttaaatgtgtatgtttttagagggggcaggaagtctccaggtcactgtattccccaccattccctactgccttagggctattagaggactgacttggtcctgaaggcacctgagtttgcaggtctgcaaaatccaaccttctcactcagagacgaggcatttcaggatcctagggctgtagtataacagggttgcagaaaccaaaacatatgccagtggaacacagaaatcatgagccttcaacacactgggttatcactaaccaacagcaagtttgaaaaccaccagccaagaagagaccggagcacatgccctgctttcttggaattctgagcagagcaggaaggtgcagagaatccagagaattgggcttcccttaggaactgacacaatttgggtgatttctagagatttgctttaagatgatcctttggggaacttcagcacacacccttgaattttccttacctgtcctcccgggattagaaaaaagaggctgtttctagatctggtctctggtgactcgcctttcccttcaaccttccgcagttctagaaatgcttccctagagaactgggtttgagaataaacaaggtggtgcgcgagcagcgcggttttctgtgcttgcagtggagaccgcctgtgacaaggagggtcctgtactgggaaggagggggactggccccctgctaagtgcctggcgactctcatctcttgcagagaacgaatgcataacctctctgccactccctttctctttctgaagccattggatgccctgagagaaagcagagggtttccatcttttccagagcacagtgctgggagcaagggctgggggagatctgttgtcccagttcttcccttctaaggcaggccttgggggaggactctcccccaagactctgcagcctggtgctcaagccggatcggcccgttctgtgcttccttttgtggcaccatcagagtctcctccctgtttggaggctcaggtgaatcagtcccctctctcccaccctgcccttgcgctgggctgcctccactctgctcccatggccatatctgtagaaggaggctcttcagtcttctgaacatgtcaagattcggaaattctgcccccagccacctttttgaagaaaatgggaaaagcggcgccctctagcgccagctgctcaatttgttttccctctttttcagaagagatattttttcttcttttatggtgcccccaagtggttgtttctgtgtattgcagccgcagtctcactgggatgctttccgctgtgtagctggaggggctggggcagcctggtggtcagcactcacatcacaagaaaggaaagcgaagccaggaggagaagggccttggcagggcacgatgagcgccccgagactcccaccgcagtccagggccttccccctccctgaccactggcaaccccttgccatctttaagggcttgcctggacccatggctgcaaatgagccaaaggcgttttcctcttggatgtgaggggatgggtgaagacacgtgcagaaaaggaagtgctcattgtggaggaggtgaacataattggaggaattcgctttggcctttttggctgaaaaaaatatttatgaaattgctgtacacccccgctcccccccccgaccccaagcagagttagacacctatagaattccaggcaccgatgaaaagacctttaaaattaatcgcacataacttctcattgaaggtgcaggtgagaaggctgaggcgcagagaaggaggtgggcgtggggcacccttctgaggaccccacctcagccgctcataccccagccacactgtcctccttctcttctcttctgcttttagctcctttaaccatctttctcttcctctttttctctcgaagcctgtagcagggagggaatgaaggcatgcagggttggcgtgtgagtgaggaagagggcttgtccccctttcccctctgtccctgcccccgcctctcctggggacctccttgcagaccctctgcagctgtgctcacatcccactactcagcctcactgctgttctaaaaaggcagcattactgcctgctgatcaggtgatgaggaacctgcaacccttcccaaatttataaagaaaacagaggaattcagtaaattctctttctgctcttggagtaggacagaccagtggtcagttctggggacagtgctcctggtgtggagacagtgttggctggacacacccagcttgggtgcactggggtcaggtggtcaggtctaactgcatccccctcctgtcactccatctcaacaattccccaacccagtcctaccccatctcaacccttcctcaacccaacctctctccatctcaagtcctccccatttcagccactatccgtctcaagcccttcctatgtcaacccttatcaattaaactcctcctcatctgaacccttccctaactcaacccagctcatctcaaccccttcccatctcaaccgcttcccatctcagccacttcacaactcaaccccttcacaactcaaccccattcccatcatggccccatcacaactcaaccccttcccatctcattcccttcaaaactcaaccccttcctgtctcaaccccttcacaactcaaccccttaacaacagaaccccttcccatctcaaccacttcacaacttaaccccttcacaactcaatcccttcccatctcaaccccttcccaactcaaccccttcccatctcaaccccttcccatctctacccctttacaattcaaccccttcacaactcaaccccttcccatctcaaccccttcccatctcaaccccttcacaactcagccccttcccgtctcaacccctgtcaatctcaaccccttcacaactcaaccccttcctatttcaaccccttcccatctcaactccttcccatctaaaccccttcacatgtcaaccccttcacaactcaaccccttcacatctcaaccccttcacaactcaaccccttcccatctcaacccttcacagctcaaccgctgcccatctcaaccccttcacaactcaaccccttcccatctcaaccctttcccatctcagccccttcccacctcagcttcttcacatctctaccccttcccatctcaaccccttcacaactcaaccccttccttactcaatcccttcctatctcaaccccttcacaactcaacccctctccatctcagtgtctccccaacttgacccttcaacatctcaaccacactcatctcaacgcctccctatttcaccctctccccatctcaagcctacctcatctgaactctacccatctcaccacacccatctcaaccctcacccatctcaacctctgccccatctcaacctcactcatctcaactccttccctatctctacccctgcccgtcccaacccctcccatctcaattccaccgccatctcaactcctcccccatcttaacccctcctcacctcattccttctccatctcaaccccctccacctcaacttctccctcatctcagcctcttcctcatcctaacccctcccacctcaacccttccccatctcaagacttccccatctcaactgctctctacctcaactcctcctccatctcaacccctccccaacttcaacccctcccccacctcaactcctctccaacttcaacccttcccccacctcaactcctctaccattgcaactcctcccccatctcaactcctcctccatctcaacccctcccccacctcaacctctccccatctcaactcctctctcatctcagcccctcccccagctgccatctgttatggttgcttctttcccctgtgtttatacttaagctgggaaaaattccccctccctccctccctcctccccttccctctttctgtgatgaacatgaaattatattacacatataggtctttgttttgctcttattcttttagtttttaaaaattacaggatatggtgtgcatctttctttggccatttctggaaagatgtccataacatctctttcacgctgcagagtattcctcagcatgactgaaccacagtttattccagcaaccctatcaatggatgttcccagttgctttgcagttaccagctgtgctgtagtaagcctcccctacatgcctttaggatgtgcactttcatttctgtagggtcaagtcctagaagtgggactgtggacaagtctttcccacgctatgccctcactctccggaggactggcacttctctcaacacccctcctcagcatctcagcctcaaattgaaatgtgaactttcacagtctgtgttatctctctggccccactggagaggcccgatgaattaataatatgccagcaggaaacagagagatggagttattaattgtcagtccatgagcccaccctctcaaggtcctaattagcatgctgacagcttcggttttatccagagctagggcaaggctctggggacactgtggctcagctaggggcatccggcacagagtggagagccctggtgcctttctgggtggggtggaggggcgcttgcaagaggcttgtgaattcagaagttccttcagggatccctttgtgcctgctgtggggtaggggagagaaacaggctgggagtgggggcaggaatgggagttttagtgtccaggtggtggtgatggttggtgtgtgctgctcttgggccccagtggtgggtttgtgattctggttctgctgcaggacagtgacactcaccaagctgtgttgggtgtagttgtctcagggaggtgcctgctttcaaaccaaagttcctttgatggggaggactgaccccaggaagactgattgcgtatcaatattactctaacccatggccctctttcataacatgcacactcctggaaaggatatcattaaatctggcattggtgcatggccaggctcacatagggttgctcaagaaatgttgctgtaaaggaggccgggtgcggtggctcatgcctgtaatcccagcactttgggaggttgaagtgggtggatcatttgaggtcaggagttcaagaccagcctggccaatatggtgaaaccccatctctactaaaaatataaaaattagctgggcatggtggcacacgcctgtaatcccagctatttgggaggctgaggcaagagaatcgcttgaacctgggaagcagaggttacagtcaaccgagatcacaacactgcactccaacctgggcaacagagtgagattccatcttaaaaaaaacaaaaaagaattgtttctgtaaaggaaactacctataggaagctgcgtgaccttggccaggcctcttcacctctctgggccctttttaatgtggattagaggtggtccttattttggtttgctccatactgggcagccagaaccatctagaacaccagccaggacttgctccccaagggtgctcctctgttgcggtgcctgcctctctgcccaatctctctccacacagtggaggctctgagtctttcctactttgagccctcatctccaccagcatctatgcgtagctctgctgtctcaggcgcctctcaagaagtttcaggcagcagagttggtggaagctgaaaagtcatttgaattagtttgcctgggtctattgctcaggagcctgggcacatctcttaacctttctggggctgaggacaccagcattcagggttgtgtgtgaggtgcttagtatgattattactcatgtttgttattaggctctgtcctgcttcccccaggctgtggccgggaagacagaacagccatttacacagtaagctgcccaatgaccctgcctttcccattcccagtctgcttttaaaaaatatgggtgtctagaccccaaccctcaaagattcagatcagttcatcttaggtgaagttttaacaggaagatgtatatagatgtatatattttacaagctcttcaggtgattgattagtttaagaaccattgattgagacccatggcaactgggcgggcaggtaccttgtgctcatggggcctgcccagccagacacagcctttttcaggagcaaatccccctatctcccttttgggacacagcagactgtctgagatcatctgatgacctctacatactcttttctgggactaagctgcctttctggatcagttagaaggcaactggaacatctctgaaaggttctggatctctgtgcacatacagtaaggggacagagctcattctgtgacagtcttaccaatgcaccacaatgtagcagtctctcgttgtaaggcatcacccggagttcttcgtttcatgaccaaaaaaattaaggagtgtggacaaagggtgaggttagaacgaaagtttaataagcaaaagaagaaagtcctctgccacagaggggacccgaaagagggttgcctttttacagttgaattcaaaagcttttataagaaactcccctcatctctgtagctgtttgtgtaattccccttatctgtgcagctgcgggcatgtccttaggcaagcacaaagcacagcttctcttgttcgggttactgtggttatgttttgggtaggtcccccacctccctgtgcaagttcccatggagcccactgtgtacatgcccgaaaagaggaggaaacctttctgtgggagcccactgattacaccaagaacaaaggctgctatgttgggccttacttgcttgtctgtgcagctgcagcctgagttttccccaggctgctctatttgtgcctgtagcttgatttttcaggctgtctttcattttgaaagaattttaccaaagacaagctttagctgtctgcccaactagtttttccttttctcctccctcaactggatcataacttatgactctgaggctgagtcctgggatagttggatgtagagggggcattatctggatttgaacccagtaattcttagctgtctgatattacataagttacttagccttcctgaacctcactttcaccatctataggacaatatgtgctttgcaataataacattagatttctagaaacacacacacatgcataacaccaggaacaaattttcctataacttattttattgatttcttttacatatatgaaatagaaaaatgatattccaaagaattatacctctcaattttttttaggaaaaatgtttaaaaaataaaaaaaaaagaattcaaattgtgcaagtaaaacaaaaggtaaattggagctctgctttaaagtaaatttcaatagaagattgttgttgttttctttaagtaagaagctgaaattgcggagtgagttttgatgtggcagtgtgtatgctgtcttggttatccagctgttttgactcggttttgatggcaacatatactgaccatgaaactcagaggtaagtaatttcaccattttgaagacacccacagctcttgacattttcaaagggtggttcccaaaataggagttcttttgagatggcattggtatattccagggtgatggatgccagagattggctgggtggcttgatctgggttgcagacagttaaaagttaaagaaaagtagggtagcttctacttccttcatgacctggtccaggatattaacagacatgccagtggacctgggtgcttgatgttacttaacacaggtatcatttccactttttccctctgctccaagccacagggaaactcagccatttccagggcccttggtttcaggaaggtctctgcagttgcatggagcctgctttgcctggcattctgcaggattctttagtacaaggattttgactgggtcaaatcagagatttgggcaaattcctgcattttaaaatagtcttctcctaaaaccctttcattctatgtgatggacagataagagatacagggctcctgtatcagaaattttatttgacttttggagtagagtgacctgaagaacaaattgcagttttatttttctcattacagcaagtcaggaggaggcagcctgggcctggtggggcacttctctgatgtcaacagggtctgcccaccctgccatctttagtgtggcttcctgcatcgccgatcgaccaagtggcagacctgagggcaaaaggaagcctgatattggagtcagccccctttggaagaactttccctacagcccacctagtaacttctgatgatacctccttggcctgatttaattcagtgcaccaaaaatattatcatttcaacacaaaaccaatgcaaacaaagaatatgcccctaaatgaaatggtgggatctagtttaatttttatcaagagaccttcctgaagccaagggccctggaaatggctgagtttccctgtggcttggagcagagggaaaaagtggaaatgatacctgtgttaagtaacatcaagcacccaggtccactggcatgtctgttaataaaaaaattttttaatgttttcattcatgtatcgtttcaactgaatcacatgtaccctaaaacttaaagtataataaaaataaataaataaaataaaataacaaaaaaatgttttcacaaagacagttttcaaagtaacaaaggacattgagaaaaaaaatcctttggttgttccaagtgtacagaacatcagataaaaataacatcaattttccacagagaaaccaaatatgtcatttaaatgcttccagaattaaacatttgatgtgtatgttgggtgaggaggcaacaggattggatagggtggtgggaagtctgagttttggtctcccctctctcactaactagctgtgtggctttcactaaacaactccagccccttaacctcactagctcagttttatcatctgtaaaatgaaaggattggtctcgatcagtgctgtccaataaaaataatatttgagccacctgtataattttaagatttttagtagccatgttaaaaaagcaaaaggaaacaagtaaaatcaatatattttatttaatccaatgcaccaaaaatattatcatttcaacacaaaacaaaattattgagaaagtattttacatttttttgcactaagtctttgaatgctgtgtataatttacccttccagcacatctcagtttggactggcacagtgtcaggcgctcagcagctgcacacctctcctggctactgttttgaatggtgctgccctccagagctccaaggtttctttcagtcctgacccttgaggattgtcacctttttttcttgactcagctttgagtgtcttggcctctctttccatcccccaacctggggcttctcttcaggcatggggtgaagggatcaaaaccctgagggccacccccactccatgatttctttctgcactgtctgctctctgtcctgtgctttcctgatttggaatcacttccctcgctttttctcaggctgagatccctcccagcttgccttatctctgcctggtccctgaggtaacccatttgcagcctcccattcctgctctgtctaggccatttcatgttctcttaattttgcattccattgcctttaaaatcttcaaccacttaaaaatgtaacaatatacatttttttctttcattacaaaagacgtgctcattgtgaaacaattgggaaatataggagcttataaagaataatataaaaatcactcataatccactcactccaacccaaccactgctaatgttttgatgtgcttatctttggtctttttctaagcattacgtatacatgtaaatgtgttttaaatttctttttctggagattttacagaatatatagttttctattctatttctttcacttttcattatactgtgagcgttataacaatatcattaagtatcgtttgaaaacatcatttgtaattgctaatggctgaggttcagggagagattttgataatattatgtcaccattaagctagggacttagataaacttagtatctgccctgcttctcattcctccttgttgaagagctcttgaccaatgtaaaaagcaatagccaaatgtgaaataaagaactaccttattaacagctcagcaagcactggagaccggcatgtttgcatttccacgctcattggtctaggtgaggcttcctggtccccatccctggaatctaagatgagctgggcttgtggagcaaccttgggcttgactttcctacttggctcagactggctttggcaaattgcttaaccgctctgggtatgtccttatctgtaaagtggtgattataatagtgctcacctcataggtctgttgtgcaaattaaatgagagagacatataaagtgcttatcatagttcctggcagatagtaaatgatccataaatgttagttttaccatttccctatttttggacacttaagtggcttaattttttttactattataaattaatcagtttatcagtaacaaatatttattgagtacttactactggccaattttttttttttttaaatactagaaattacaggggtaaccaagaccagacaagtgtctgatctcatggaatttaaattttaatgggagacatgatcaataagcagggtaagtttggatatggaaaaggctatcaatcacatacaacaagatgatgccctgagcttcaggtagggtgggcagcgaggagctttctgagttaggtgatgtgtgagcagacatctgaatgacaagggggagatctggggaagagcaagttaaagaccttgaagtggaagtgaacttgaggagttcaatcaaaattcagaagcagggagcgcagggggtttggtgtggtgggaggagctacgggaggtgggcaggagccacctggtcagggaacacttcggagctcagggtgaggactgtggacttcattgcaaggtgtgagacatgcactggaggcttccgtgcagcggagggatgcctactcagtggtgtgctggagcgggctcatgggagcttctgagagcctcttggcacgtctcttcccagctccttattcagtgaaatcatgttgataagtggcttgatctgggttgcagacagttacagattctcctcgatttatcaggacacaatctgatcaacccattgtaagtgaaaaatatcatcagtcaaaactgcatttaacaccatctaaacccttcctaaagtcaaaagatcataagtcaaaccatcataagcccaggactgtctatatttataacacaggagtttatagcagatgctactcttcccctagagagctagttgttaaatgtttaccagcacaccactggaacaaactaatctaggttttaaaaaattctctttgcctatgctctgtgaagaatgaattacagggaggcaatatgcagttttgactgtagttttgagaatttccttaggataaattactggaagtgaaattactacagaaaattatctaattgctccccctactgaaaatgttcatcatttatacctccactagcagcaaggtaccatttccttgtactcttactcacacttagctttagccacccccatagaatgttccttctatctagaactttgcattctgttctctatgtgtagctgattatttatttatttatttattaatccttcaggtctggtctcacatctctcttctcagaggactttcctgaccactctatttcattgtaattacttatttgccagaaccatggccatttatttatgtctaggacagggtctgccacatagtaggctcccaatatatattattgaatgaatgaatgcatccgcctacctttctgaattctcaaattgatactaatacagtcaaaggagttcctttccttggaatgtctaggattggcttttttcagcttaatgatatttctggagttgaggtatattaagtccaaagagttcaataattgataacaaaatactgtgcaataacctaacattataacaagatattttgcaataaaatgcagctttaaaacatctgttatccaagtgaagtgatgactcacagagaaaatatttccaaaccatacatctgataaggagttaatattaaaaagatatgaggaactcaaacgacttaagagcaagaaaacaaataaccctattaaaaaatgggcaggggacctgaacagacatttctcaaaagaagacacacagatggccagcagatccatgaaaagatgctcaacatcactaatcatcagggaaatgcaaatttaaccacagtgagatatcagttcacacctgttagaatggctataataaaagagacaaacaatgaatgttggtgaaaatgtagagagaaggaaattcttatgtattgttggtagaatgtaaattgatacagccattatggaaaatagtatggcggttctttaaaagctaaaaacaggactaccatatgatccagtagtcccacttctgggtatatatccaaaggagatgaatcaatattttgaagagatatccacactcccatgttcattgtctcattattcacaatagctaagatatgcaagcaagctaagtgtctatcaatgggttaatggattaagaaaatatggtgtgtatacacaatgaaatactttcagccttagaaagaagaaaattgtcatttgtgacaacatgggtgaacctggagcatattatgctaagtgaaataaacaggcaccgaaatgccaatatcatatgagctcacttatatgtggaacccaagaaagttgaactcagacatacagagtacaatggtggttacagaggctggggacgaggggggtggatgagaaaggggtgaggttgttcaaagggtacaacattttagttagacaggaggaatgtgttttagagatctgttgcacagcatgttactatagttaataatagcagattgcgtatttcaaaattgcgaaaacagtagattttaaatgttctcaccacaaataggtatatgaggtgatggatatgttaattagcttgattttatcatgtaaaatctacaatttaaatatatatgaaaacatcacattaaaccccataaatatatacaattattatgtcaattaaaatgaattaaaataatagaaaacccccaaaaaagcatgttatccattaaaacacgaaaaaccaagagccgtcaataactgcatgtttctagtgagactacagcaatttctctgtgcacttgccagaggcttctctgacatgtggtcaccctggagcccatgcaacaccctcttattgccacagacttctgtgctcactgcatggccaatatgtgtagactaacttctgacagttttatattctcttttaaaattttccacatttgctcttgatctcattctttcttttttctgtgctataaatttctccagctctactagatcatcccaccagtgtaaaaacatgcaatagaatgtcacatataagaacaaaacacaagaatccttgctacctcatacgcctctttatcctcggtcccatttctctgctctcctgtatagcaaaacttctcagaaaagtggcgaatgttgtccccactttctcatctcctgcccctcctaaccactctaacaggtggtctgctcacaaaaactgctcttgttcaggtcattagtgatgcccacattcctgagtcccatggttctttctctgtctttatttgatttgacttctcagagtacttagactctcattcttgaagcatttgcttctctggcttttgtggtagcatgctgttctagttttcctatttcactggctgtcccattccagtctctgttgctggttcttgctcctctgctatacccctgatgtaggtgtgccccagggctggcttctgggccctcttctcttctctgtctatgctcactcccaggatctcacccatttttgtaggtttacataaatccacatgtaaatgactcccacatttatagattcagccttcatctctcctctgagctcctgaggctgaaatccagctgttcccttgacatcttaactcaggtgtctaatgagagtcttcaactgaacaggtccaaggaacttttgacttatgccatcctccagtctattcctcctcatgtcttcctttccccacaaatgacactaccatctatggtgtggctccaattccagattatactaaacagttaagggaggtgtgtggtgagaatggtggccatactcccttggggtgctgtcaccaggaccagtcttgagcccagttcagccctccttgtttagtagcatatgtctcagaacatgatatgcacggccacttccacccactgctttcacttccggccccttttcttaggagttttggtctcataatggctctagaagcagaggaactgaaggctagagtgggcaaaagtattctctctacttccaaaattatattcatgcaagagaagttgacttcctggttttctgggtagtacaatccctaggtccatatgatgtggagctggaattgtggatggggaatggtgcatttatggaaattctttcagggcagtaggtttgttccaattccattctcatttttaaaaataccatttgcttttgcctttttatttttttaaatcatcaggtggggagtgggaaagtctaaatcaaagactgtcattcagatggtattttaggctagaaatccccaatatagaaatacaaatataaacaattaggagaaatttatttatacccatgagaatggcaaaattcagaaaggtggatcataccactcttgtcactgatgagggagatggaaatttgcacgcgtacactggtgggagcataactggtacgcttattttggaagaatctagtgaagtgaaatgtgtgcctgacctataatccagcaatcccactcttgggtatatatgtcctagataaattctgaaaagatgtgtacaaagatttcattgtagtattttacttgtgatagcagggacttagaggcaacctaggtacccattccaagggaatagataaagtgtggtggagcatctatgggagggatatgcagtggagaagcgacagcctaaacacatatagcagcatggttagattttcacaacagtgttgagtaaaaaacaataggaactggatgagatttataacatattatgacttatatgttaagttaaaaacatacctaccaaacttttcctatttgatttggatatttgaatatttaagtttgtatgttaaatatgtcagagatggtacccatgctaggcagggggttgaagggggaaaaagccctgtagcatctggagtcaattcagacatagagaataataatatgtctaaaattaaagacagagatttcaaatttgagatattttccctgtaaattttagaaggttagagtttcccaaatttagatttttttttttttttaaagaactgcctttaaaccaagtttcatgccctgcttgagtaggccatgactttgtctatggcagttagagctagactctaccttttttctgctcccaaattgctccgagttgcttgtggtgtgaaaccggtatacacaatcagttgccttactttctagaggatgaaccccttaaggacagggctgcaactcagtcatcctggtgtccccatcacccagcacagtgaccagcagtgatctgtacttatttgtcacctttaattgcatcacggtgtttgtagtctttttggtgtatgtgcgtgccctggcaagaggctcatctaaggcatttccccacaaaagggcaagcctctcccacagatacagtataatactaacttccaagaacataacatgtcatatggtcacaggtataaaaacataaaatggattttcccgagtgatggccaaatttatccccacagggaggcagcatcttttctacttaagaagtacctttcggaagtgcttttcaagttaatccaatcgcaaaaacattgaatcctactaagtgccaggggacagaagtctagggggcatttccaccaagatggccagaaggctctagatcaagtggtaaacagagcgtggtatgtggagtacaatcctttcggcaataatagtcataataggaaataataaagacctacatttatagaatgctttagacctttcaaaagtactttcgtgtcaattatctcagtatggtttggtgaccaaatctcaggcagcacctgtgatcaggtagatgttttctttggaaaatgatctccagcattgggctacatattttttaggttgcatgagtgtgcgggggaaagaggcaattgtcgtatgcttccatagaaggagatgaaggagcgaagaatggaaactttcccatccctgggagtaaaaccttacatcagtgatacccaatcctgcttattgatgccccaggggtgtcttgaaattcttcaaaggaaattaattgtaattcacttcaatttttaaaatccacagatatgctgcatagcacaatgcttctgggcagggtggcccaggggaggtggactgaaagttgtgtgtgtcaaagaagctgtcaatccaccaaagaacaatagcaagctgaaactcccccaaatttgggggagtgattggtctgtgtttgaacctgcagggtaggcagaggcagaaagggttgatgttgattactgaaaaagttgaaatagctttgtgggtgaccagaatgacatcatgctctcaacagaggatgccctgcctggggccactgctattaagatgcccagcttggctggacaccatggctcactcctgtaaactcagcacttcgggaggctgcggtggatccaggctggggtaggccttggattgcctgagcccaggagttcgacaccagcctgggcaaccttgtgagagccctgtctccacaaaaaatttaaaaaaattagctgggtgtggtggctcatgcctatgatcctactcaggaagctgaggtggaaggatcgcttgagcctgggaggtcgaggctgcagtgagccatggtcatgccattgcactccagcctgggtgagagagcgagacgaccttgtttcaaaaaaaaaaaaaaaaaaaaaaaaaaaaaaaaaaagcgcccagctcttcccaaagtctggaaaagcaggcttcctggcccctaggggctatgtcaaatctgtgttccacagtggatggcaaggcttcattttatccttatcatctttaatcggctaagttaacaattcattgctcttttttgagacaaagtcccactctgtcacccaggctggagtgcagtggcgcaatctcggctcactgcaacctccagttcccgggttcaagcaattcttctgcctcagcagaagtccagagtacctgggactacaagcgcctgccaccacacccagctaatttttgtattgttagtagagacggggtttccccatgttggtcaggatggtcttgatttcctgacctcatgatctgcctccctcagcctcccaaagtgctgggattacaggcgtgagccaccgcacctggcccaattcactgcttttaacatttgttgatgccaagaaagtgctactggaaggctgctataggtttaagaacacaatgattggtcattctttttctttcctacccagattggaaattccaagtttgctctgtcatcacatctggttaatgcagacactcgaatcactgtgtgttctagtactcagaacttaaaagtcatcatatcggatatgggagactcactgacaactgggcctcaaaggaatttatcaagcgccgcctctgcttttctcttcctgctttgctgggtttgcatgggagctgggatttgcgggcagctgtaagtgtgtttgggctggaggcaaactcttgtgtctttttagcctgattctacatagcatagtaggaaaggggccagagaaagtggctggcagtaagaaagcctctgttttgagaatgtgaagcagcctgggagagagtgagggaagaaaggaggggagccgagagttagaaaagccttaattcatttcatctgacagctcagagccagaagttgccaggtctactcatttgcaggttgtgttgtcaacacaatcacagtattttatagcccacacggaccttggactctggcatgccatgtaataggctgcaaaaagtagcagctctgcttcccatctcacttggggcatggggagaggaggattgggtttagggaggaagggtacaggtgtgaagggcacaggtatgaggtgcataggtatgagagactcaagtgtggggggcacaggtatgggggcataagtatgagggacacaggtgtgaagggcacaggtatgagggacacaggtatgagggtcagggcatgagggagacaggtgtgaggggccaggtgtgatgggcacaggtatgagggacaggtgtgagggacacaggtgtgaagggcacaggtgtaaggggcacaggtgtgggggaacatgtgtgaagggtacaggtataaggggcacaggtatgaagggaatggatgtgggggacacaggtgtgaagggcacagatgtgaaggacacagagcttcatctttgctcctcattttgttcttgcgccttctctttccagctgttacaaagtgccttccagtgggccacctccccacttcctctgttgggggcaggccagcacagcctattgcccagatggcagggtctcaaaacagcctcccagtgacctggttctataatatcctagaaggagttggaggacatgaccatgtcctggttctttgtgttcagataaactcaaaggccctcaatttcaagcccttccacatcctgtctctttcttccttccattccccagaagacagtgattggtgggtcaatgggctccataggtgatgttccaccccatgggagagaaaggatcttagtgcagctgtgcccactgtcccatacgtgggctgctccctctgcaggaagtctatctctgcagaccagccttgctgtcaggagcgccctggtcacccggcctctctggcttattgtgcaggaggggcagaattctaaaccaaggagaagaaaagcccaaatggagataagctggcccagtgcagaggggcagcataacttagtaggaagcactaggctagagtttgagtcctggctctggctttgcaaagtgtgtaagtttacacacaccactttacttttttatactcaatttctttctctgcaaactatgggaaaaaatctccactttctctactttacagaactaatataaaaatgtgtgaaagcactatgcagaatatgaaataccagatgaaagtaaggtggtggacagaactgtacagcctcaggcttctcaaccaaagatccaggtccattctgctgtctgcctccagtagatgtttgacacgaactccatagtctcaatttcaacctcatacttcatggtttctttgtctcttccctgggttttccccatggcgataagagatcagaaaatgtgctctctctttgtgtctgagatgttggagatgactaagaaaatatcttaaatgtattttgaggcctggtattctaaaacaaagcctgctgctgaggaaaactacaaagggtggtacagatttaaaaggaggcagatagcctgctgcaggcaggaccacagtcttatcacctcactacacagctataaagacacacaggttctgaggtggcatgtcctgcagcaactgtgtaaggcagggcttcttatccctgttttacagataaggtaatactgaggctttgtgagcagacagaggtctctccaatggtgaggccaggatttgatcccaggtccgtcaaactccaggatccattctcttccccctgcagcacaataaatttgattatgcatagaatgtatatgtgacagctctcatcctgtatctgcctcacagcaggacttagtgctttgatgaatcctcaaaataatttagtttcatagtacactgatgggaaatggagcttttactgaagattttctggggccagatcaagaagacattttgcattaaacatcatctaaacaaacttcctttaattccttgaattcattcttaacatctctgttcttcctaatgcttgtttctcagctctacttccaggattggttcatctattttttctcactcttttgctttgatcccttggtatctcctccattgttccaagtaattcatttccctcccgcagcataggcagggtggccgagaaaaagccctgcagttagttgagctgccttcctttgatagcaatccagtgagcatctgggttattctggcatgtccccaggtggggctgaccaaagcattcactcaacagagtaggtgtcctccaaggctaaggtggactgtgctattaaaaaaaaaaaaagatttttctttatattgtgtgatgtgggagagatggagaaggagaggtaaaagagagggtgtaaggtactggaactgctatggggggaaagggaggagggaattgacaggggacattaaaatttgaattacaggacttggtgattatctggagaagtagagaaaggaaagagaagggaggactcccaggtacttgactacagcagcagggtagagtaagatggagaattctggaagaaaaatggatttgagatgggtgagaagaagaatagtttggggaagataatttagtttctgaatgtagggcttccttgctatctacttgggaccctgcccctcctgtctgaccccagcagatgcactttttgctttagttttaggtcatctgctgattcatctgctgattcaggccagcaccagctggggagatgggagcagccagcaagctcaggagctcagaatgtgattccccagctcaccgccatgatgagtgctccgtagacaacttactctgcttggagtcccctggggttgctcccacctctggggtctcctcttccatttttcccagctgtggttcctctgtcttctctctctgtaaattttttgacttctgatctttcagaaatttctcacatctctggctcactgatggcattcatgttttccagtactagttttagatatgttcctaaacaaaacacaacaaaatggaggaaaagaaagagagatacgtactgagcctactttcttgatcaacacttctatacttatttgttttcatgtctcattccccttcatgactttgaatttcttaagggcaggaatccctttctttctgagcactaaccaattctccttttccatgcactagggaacttagtatttaggaaattctgtggctacttcttttgtaattgaaaacaaagattaaaatacaatacataatcttccaattcaagatttgttttttcatatatttccaagtcaacactattcctgagtgcctcttctgtgtttagcatgaatttaagcaaatatgtggaaaagtggaaaacatgaacacaccagatgaccctgctattccccatgcttctgggtttcagggctggagaggatgaaggataggaagtgaggatgaaggatggaagtgattctctggcctagaggaagtgccttgtgtagctggctcattggtaggtgagcttctgtcagtcctccccaacttcatgtctttgctgcatacttgtcctgtaattggtattacaccaggagtatgaggtacaacaggtgatgtagcacacaagggccttgccctcaatgaactgggtggatcagcctgacacagaggcagcagttggggagcattctaagttaagagttaaaaattgtagctcttgacagatctggtctcaagctcacctgacttgctaaattagtgattcatgcagtaagatcattcagattccaaaaagggaggcatcagtatggggagagcatcttttcacctttgcacatggctccagaatttccactggttcaaaagaatccccagcaaccccagtctcaggagataattgctcttaacagcgcaccacactgggcaccccagcacttatggacagcagaggaatgtaagggtgaatgcatgtttttttttctgcaaatgactgtcactcattcatcttggagcccacctgacaacttgctttccaggtaaaatagcatcatttttctaggctggcttcttctatgctcactagcagggctgacctcagatgtctggggcagtcttaggtaccttaccagactgtggtgttctttggggggacttccaggactgggagaggatgtggcaggggccattgttctggagtctcccaatatctgtgaggtcatcacaggggtgccatcctgcccttgcagcacagcttagattttgccttggtctgtaataaaggatgaagtgaatctctgccaaaggtcccaggcttgcttggtgccaagggtttcattctgagcacgtcagcatacagtcggcctaatggataaagctattatagattatctaattaatacagcagactgctgtttcattacaggggctatggactctgtcagtgcacaatgcgtagaggtactgccatcagtttcttgttcctggtgttggggtggctaatgtactatatgaagattcagaggcatttaaaaagatgatcaagtgccatgctgaattcatgtttacagcttcttggcttgggctcttgaaatctagaagtctttgggactgaaagcgaagaatttgtcttggttcaaatgctgtctgctcaatcccattattgccttccagcacgtgcccttggacactctcgtatcttgttgtctggttgtagagcagattttcacatgctgggagacatcatgaaatgtgccatttgtttcactgagaaagctcttctggtggctggtggggctgtggcacctactagatcactgtgttatttccagatcctgtgtttggtgtaaatggtacctggtttgtttcctatctttaaattacagtattcttaggagtgctgttcttttgaactgcacctgttggactcttcttaattcccgaagaatctgggccattgttttttaagcttgtaatattatccttcactgtagggtgatttggtaaggttgcacttccaaggttcttacattcttcccaaatgtacctcattgcacaagctgctaccaggagaaaagggtgcctggattagtctcagggttcaaatatccagaatatcaaggtttctcttaggaatagttaactgagtaaaagaaaacctgcttgttattctattttgggattttccccccctataaaaatagaactgtatttaaaagttaaatctagactgggcatggtggctcatgccttcattcccagagctttgggaggccaaggtgggaggatcatttgaagctaggaatttgagaccagctgggcaacatagcaagacctcatctctaaaaaaaaaaaagaaaaaaaaaattagccaggcatggtggtgtgcctgtagtcccagttatccaggagcctgaggtgggaggatggcttgagcccaggagttcaaggctgcagtgagatatgattgcacctctgtactccaacttgggcaacagagtgagaccatctcttaaaaagaaaaaaaaaaaaagcagttaaatctacgtatagatagtaaagtgttttagtttttctgttactgcctttacaaatgaccacaaatttagtagtttaaaaaaactccaaatttattatcttacaattctgtaaagcagagacctggtatgggcctccccaggctaaaattaaggtgtgggcagactgtgttcctttctggaggctctcagggagaacgtatttcctgctccttctggctgttggcagaagtcaagtcttgtggctgtagggtcgcagtttccttcccttgctggctgtaacctaagggctctttcatgcttctggaagctgctgcattccttggcttgtggcctcttctctccatcttcaaagccagtaatagcgggtggggtctttctcatgctctgtcttttgaactcactcttttctcttcatctctgcttttaagagctggtgtgattagataagagattatgtaattagtcagaccatgataatccatgataaatctcttcattttaaggtcagctgattagcgacctcaatgccatctgcagtcttagttcccgtaatttacaggttctggggattatgatgtagacatctttgagggggacattattctgtgtaccacatatgatttcttcattaaacacaatacatgtaatttaaattctagaggttacaatggggaggaggtaaattagctttttttgagcacctactgtatgccaaacctcatgctagatctgcacatgcatcccctcattctaacatctcaacaaccagatgagatagatactatccttgtttgatgatgagttaactgaggtttagagaaattaactaactttcctgaagtccaaaagctagtaaacgtaggagtcaggactcaagctcaggtggctaagattccaaatctgaatgtttctctttccaccacatcatattttttctcctgggatctcaactaaaagcctcagaagtaatcacttatttaaatgtatgtgtttcctccaggttcgttatagtctgtttgaagtctgagtttgacgtagatagattactcatttcccctactccagcctctgataagcagcagaccaattgtatattaccacaacctgggaaaagagagataactgataaagtgaagagactttgtctcaaggcctttggtggggctgagctctaagtcaactaagtggcttaaagtggaaccaggcatcttatccctgcagggcctcccctgggtgtgacaggtggagggcataccagtcggaaagctggtccaagcctcctctgtcctgctcatctcagctgcctgggactctgcagagaggctgcctgggactctgcagagaggctgcctttggtcaattcaagctgccccagccagcacggttgactggcacagaacggcctggagtggctgtgccaactcagtcataatgggaggagctgtgcagagaaagaccttccaggaattgagggtgcaaggagataggatggggcagatatgagcggcaagtttggtggggccattggcagggccacatctggaggcctcccattctgtgaaacaccccagcagtgtgttaattgatttattttgagtgcagtttgtttggatgtgggtagactattgatgctgtggcactttggaagctcacgtttccaagccagagatacttcatttgtgtctgaatgagaaaaatctcaagatacatgccgttccatccctgagatgcctgccacagtaccaactcatggaggctgcagttacttcagtctcatatacacatatatgtgtgctcacatacacacttttaaataatgtgatcggcttatgtcctgcttcagtattcttgctcttttcttccaatttgggtactgctctgacaggctggcagcacaccacaattctgtctttgcacattgattgacctgactctgacatatcaggattgcaaattactaacttgcttttaggccctggctcctgaggaatttataatgtctattgggatctcttctcccccttagcttctgcattgagagtcagaagtgtgcatgaagtggtgttggcttctttctgtttgtatccaggagggtgggaggccccaggagagcagacatctggggcttctttctgttgcactgccaatgcctatccacagatgaccttatgtgaaggtgctaggctgtgaattcctttgttttatttcaggaaacattgattaaacatctattttggatattcaaagacaaaaaatgaccaacttatttctcaattaaaatggcaaatgcaatatagtgttatcattgctatggggagtggttgggaaatataaggtattataggggcacaggggcacataggagggtgcctatattagtctgttttcacactgctataaagacatactgagaatgggtaatttatgaagaaaagaggtttaattgactcacagttctgcaggctatacaggaagcatggctggggaggtctcaggaaacttacaatcatggtggaaagtgaaggagaagccagcatgtcttatgtggctgcaacaggaggaagagagagagcaaagggggaagggctacacactttcaaacaaccagatttcatgagaattcactatcacaagaatagcaagggggaagtctgcccccatggtccaaccttctcccaccaggtgccctcccccaacattggggattacaattcaatatgagatttgggtggggacacagagccaaaccatatcagtgagtgcccaaccccatcttggtagtggatggtcaggaaaagcttcctttaagaactgacatacaagctaaacctaaaaacaaagtggagattttcaggtgaagggggattgtgtgtgtgtgtgtgtgtgtatgtgtgtgtgtgtgtttgtgtgtagaaggggttcaagaagaaggaaagacaagttctaggcagaatagatggcatgggaaaacacccagaggccagagataatttggcaattgagagaattagaaaccgagattatgggtggtttttagagcgcagtaatatcatggatggaggtatggggagagattagattagcaggaactaaaaaacgagataataatgtataggccaggtgcagaaatttgtgctttaaccttagggaaatgcagagctactgaacaattgtagaatagtttcatgatcaaatttggctttaaaggagatgattttagctgtgatacagagaacggcttggaggaggcaggaccagcatcagggagacccactgcagtggtcttaggtgataagagcagtagcctgacctaaggactagaatggagaaagcaggtgaatctgaaagatatttaggaattgcaaagagtaggactttgtgattgaagaataggattgagggagaggaggtggcaataagaatacccctatttctggcttaggcaactggatggtgatagtggagccattgatggctacagagacagagaaggcagcacaagtgtggaggcatggggtggaaagatgagagctgtatgggcatgtggaggtatagaaatacttctgtgctgttgacgaatagtcagcccttagcaggcactcatatattttcttccactgcctcgctcaccctaactaacccagtacctagggcattctcaagatctagaaatggaacagttactgtgtgacatagcaggaggtctcctgttctgactggttagtgcccttgccataccagatcaatatttttaacatcccttctgtggagacagttcctgtggtagggttcctgtggcagttggttgtaaaaagacaagagctgaggagaaagaggttatagccaaccaggcacggtggctcacacctgtaatcacagcattttgagaggctgaggtgggtggatcacctaaggtcaggagttcgagaccagcctggccaacatggtgaaaccccatctctactaaaaatacaaaattagccgggcatggtggcgcatgcctgtagtcccagctacttggctgaggcaggagaattcacttgaatctgggaggcagaggttgcagtgagctgagatcatgccactgcactccagtctgggcaacaagagcgaaactcagtctcaaaaaacaaagaaaaacaaaaaaaataaagtcatagctagcaatgttttatttgagagtcaccacctaaagggtaaagcctttgagtgcatgaaagtcttcaggaagagtgtagcaagaaggaagacagggcccagggctaaggaatttggactttaccctacgagaagtggggagccaataatgtattttaagcaggggcatgaggcaactggtgaggcctgcaggactaaagggagtgccagagatgtctgacaaggttgctgccctcaatgaactaattggggtaggcgagataaatgtctcttggaaagtaatggtcatgccaggtgtgatgattaagtagcaggtgtgtagcacagagagtaagggggctaattgtttcccacaaagtaacttggagcccctatggttagggccggatgagggcttagtcaatcaatttgcctttgtggtaatcctgaatagaagaggctgctccttgggtgagaagacaaatagacttttgagttccctttaaaggctagacacttggataactaggaagggttcttagtaaaagcaaatgccttttatgagactgtgcagtttacaaagccctttgatgtctgctacctcatttcattcttttaacaagtaagttagaggacattgcagagataaggaagtgaggcccagagacgttagaagttaattaataagttatggagccagtcttcatgtctgggtctttagatccaaagtttgattctttcacacttctccagtggtttgcaaactgtgttccttggagcccttcagggatgccttgggcttgcaggtgatggggaggggatgggaagcattcagggagcagggcttctgctcccagagccctacctcagccagggctctcaggaattttccagttttctatgtcagcctgttttggaaggtttcccccaaggaagcatttcccaatgtggaaaaacctactctatgctgtcttcaaggctatctctaggtaggcctgtccctaaaccctcctccgaagttggtgtgaattcctgtgcttaaccacatacaagatctagcaaaacacttcttcttttctaaccctaactcttcagctccagctccagcctattccctctggatcttgttctaggttgtctggtggttcttctcagtacaatctgtttcgtttctgccccaacaccctaccacctttttctagattcctggcactccagacactggaagaacgagtataaacatttaccagcttggatcctttcccagacatgcattgttgctgaccctgtgaccatcagctggacagttttagtgtcttcaaatcttgatggacttgtatttggacactttgtggcagtgtttttctgaaaccagtgcatctcaagtagttggatctaataattcctttgttctcagaaattgtacgttcattaaaacaatcctttgtccattaagttactttttttaaaggctacagtttgcctggatgtatccagtaggcatgagttagagattaaagacaaagggcccaggggcaaaggaaataattttgtttcctaatcatacagtgacattacaagttagcatttctgtagtttcccttgctgagaactgcctagaatttagtgataatttcctgactcacaaattgtgaaacctaggcctaagcctttctcctcttcttaaatatttattgagcacctacagtataggtgcaaagcttagctctaggctctgtaaaggatacagattttaacaaacagtttctgccttcaagggagttaatggtcccagcatgtgcctaagtaatacaaggaggaggcagggaggggtggatggagtaagtgctgagggtggcctgaaaatggaagtaatcagtttatttcagggttccaaatgagaacattagtattatgctaagtaacttctcttttatatcctgctccagaagtgtaggggttggtggcagaatcccgcagtggacagaggcccagaagccaactggacagaaggtctagcaaggagagctgaccctgataaatctagtcccagctgctggtgtggttgatgatagagagctgtgggctccagaggaattctggtgctgagacaaactcacgtatttcagttgtatgctttgcaaaatctgtttgattgccagtagctcttgagcccttagcccctgataggctggtcacccaccagatccacagcagggagaacacaggctctgcagacagagactgggtataggttactgctctctttctcactttactgtgttggttgcttaacttctcttgcctcagggttctcacagtgcagaggggaaatgatacctaccttgatgggtggttgaaagggtgggagagcgtgcagggaaagagcttggcatacagtagacactcattagatagtacctcattacttttgttatgaatccaagggcttcatggtgggatcaaggaccacagctgtggtggcctagcacagatgttgcattttactcttgtgagtggtcaggaaagccatgctgtatggtggagtgagggtctagagatcaggcccccatccccaccccgctccccagagcctccaggggaccttggacaagactcttaaccttctctgtacattattcctattcaaacactgataaaatggaagtgaaaaatcacaaccttctgaattgaaagggacctttcaatataatctacaataggtgtatttagtagaagagacagttgaggcttagacaaggtgaaatgaagctccaaaggcaaatcagggggtggccctgtcttgactcccaatataatgctccccttcacatagttgctacccaagtaggtggtggcttgagagtttgggagcattcatgaactattgcatctgaggtgcttttggctggaccacttatatcatagacaaatccatttttattagcatcattcaaggttcatagcataaaggcagcaagaaatggtagtgaaaatatgctgtcttccccctaaaccagttttaatttcttaactccctcctgccccttagttcctctaagtattttcctcctctgacctgatattcattcacttggtatttattccacatgtactaggctttgcgtactacagggacttcatagccaagacatgcaaagttgaaaagttggataaacaatacaggaaaaacaaaagtgaacaaaaatgcaaagcactatatgattaaatgttaaatgagaaatctatgcctgtggttcccaaatgctaatttatggatttgtacttgttgatgataacattttcatcagttttctgtgaaatgagaaaaatagggcaaggtgtgattatttcataaggctacatttatttaataggattttctgagattatatccttccaacattttagtgctaaaatgccctttcttttatgagatgttggagcataaatagtggtggttgaaagcccatacttaaaaaaatagaaagttggccacattatattggtttcttttgaaatttggctcatccttgaaatctaaagctaagacaaccactggtgggcacaaaagtccagagtgaaggggaggagcaatttttgaggagtggagtgctcagggagagctccaaggacaaggacaaacactgataaggaattgaaggatgagaggattcaataatgtggagaggtttggggaggcttcctcttgagaggataacgtgagaagagccttgggagcaagtgtggagggtctgttcagggcaatagggagaaaagtttggatgccttgtctttttacctgctgtgctcgtaaaaaattcacccagttgttaccacaataaaaactgatctttggctcctttcaattaaccaggtcactgtcctgaactacttgccccagtcactgaatcaatgccccagttcaccttgtattccagaactagtctttcatctgctcaaggcaaggtcaaaaacaggcatacaagagcatctgatgctcagtaactcagctccagttctgacttcttttttttcatccttgaccataatttagactcattaatgggttagatggtctttgctcattctggcctcgtttctgggccctacaccctaggccatgcccttgaatgtgtccctagctctgtgaggaggacccatgagcagtagtgtgccagatgcgtcacagaggggacttagggaatggaagaaggctcaacaggatgcatttactgggtggagagggaggaactggtggcctatgcctgtgggactgaggttcggatggttaccattgactaaaatgggaagagagcctgtttggaggagaagaatttggtttcagggatgttgagcccaggaatgggaagggagaactggtaagaaattggagggaggtgaagggaggatgaggagaaggaccaggtccatttggagtcatggtcaaggtcttctggagagagactgcatcattgctgatggtaccagtgagtgaggaggaaactgaaaagagttcagcctcacaggaaggctggaaattagtgcaggagggatgggcaggtgagtaggaggctggggaggtcacagaggacaagatgagagagtccattaacctagagaacataccatttgtgtctgtagggggtactcctgtgttctggactaggaggagttgtgtttcactatgggtgaagagcctgagggtaaggagaggctgtgcctgttctgcgaccctccatgtgatctgaggtattcccttggcacatactcagacacccacctcctttgcttggtgtcttcaatctttccatacctcctcctcagggggaagaagtccttgcttcaagtaactgactggctgcaagtcatggagagggttggggccaagggagccatctttttttacgcctccctctggggctgctaagagcagtagatctgtttgagcttatttatgtgcctggagttgagagctcatattttgcttattcaaccagcttcccacgctgccaggaaggcactaagcagcagaaattcatgttcaccctctctgtctccctctctctctcactctgtctttggtattcttcagctccaatgggagctaatatttacctgcagtgttagctgtggggccgtgggatgtggcagctggaggtggagaagacttttttctcccttcctcctccacctgtctttccctagagatttgaaaagggaaaaattgtaattttaatctttaagactgcctgtttgagatttcagatgttgttgagaaaagtcaaggggtcttgtgctcacttttctactgaaagataagtgtcttagtctgtgagcctctataataaagtaccacaaagtaagtggcttgtaacaacagaaatttattttttatagttctggaggctgggaagtccaagatcaaggcactggtagatttggtgtctggcaagggccctctgcctgatggatacctttctttccactgtaaccttacaaggtgtaaggggcaaaggatctctttggggcctcttttaaaagggcactaatctcattcatgggggctccacccttatgacctaatcacttcccaaaggccccacctcctaataccatccccgtggggggttaggatttcaacatatgaatttgggtgaacataaacattcagtccatcaaaacaaggaggaagatgagattggtgggcttttaggacatgctgcagagaagggagaaaatgtcagccaaggaatactgtcatactgttccttacaagtggagtgactcccgcgttggtgacaagagggcatggatgacagagtctgagacattactatgactggtcttacttggtgctggtcagctcggacaacttctgcagggggagcctagcagatttcatgtgctaggcacaacaagcagggctggcagccatagcttctccctacctgcagggaatgtgcataggggcaagttccctctgagcccactgcctggtgctgactcagcccaagtgcttacctgctcaccagtcaggagttgaacatatagatgaagttgaacgaatgtctgaggccaggaataggaaaaatgtctcagctcaatgtggtttgcgcatgacaaaaagagtaactggtgatatttctaagaccttggtacattcccactatgggacaggatcgtccctctccaggatgctgggggaagggacaggtgggagatggggcagggatgaaaaggagaaccttgaggccgggagtgggtggggatgttggcctgcatggattccacacaaggtctaagtccatctgtgtgtgtaagccagcgcccatagcggctggaggctcctccactcacttctccagtgccttttcctgcctttatagcagttttccagaaagtctattcctgttcttcaaactgctcttttatgctgtgtgtcatgatttctcatgccccagtttgtcctgttgttgccatggtagctggctaggggtcgtctccagttgggtgggaatatcttgctggcaggccacggaggcagaagaagatatgggtgacttcaggctggtgcttcggggactcctggtgttacagaccaccacctggctccccattcctacccctctgcatttcccacagtttcctatgcccaccagaaggcaaaaacagaggaggaaataagtgtaatatttgcctttgttacggccatttcagaaaaagcctggcaaggcatagactgcccctttcaagattgagctatggcagaactaagatgggacccttgtctgggcaagaaccgcaagggaacacttgtcccatcaacacttagaaagagaaaagaaggcagcagacagcaaggcaggatttagctgtgaaaagccacttccaagaaacacgaagataaactgaatgcccttgacacctatgagctaagcatctggcagctgggactctccatgcctatgaatatagaaacttttgtatgggcccttgacttcacttttgtgaagtttcctgtgatttgggcacactgcattattgtttgcctttctatctttcactttggtttctatcacatttgatggctacttttcacatgatacattttaaatcatttatttacccatccatccatccatccatccatccatccatccatccatccatccacccatccatttattcaacaaatattcaagaaataaccattgattacatactatatattatgtactgttccaactatggggagatagcagtgaacaatattgacagtctctgctctcaaggagcttacattcatctgagatagatcaataacaaatagacaagaaaatacaggatagtaaagagtggaagattaacctggggtgatgtcacagactgtgactgggtggatggtccaggaaggctctgcaaaggtagcatgtgagctgagatctgaaagccaggaagcaaccactatgggaggatggggaagaacattcctagtacagggaacaacattcccagtacagggaacaactagcttaatgccctaaggcagaagcaagattggtatgtttgagaaacctcaaggagggcagttgagataggtgagccggtgagcacttgggctgagtcagcaccaggcagcaggctctgagggaacttgccctttacacatgttcaggtagggagaagctatggctcccagccttgcttgttgttgtgtctagcacatgaactctgtgaggattcctctgtagaagctgcccacgctggccagtgccaagtaaaccagtcatagtaatgcctcagactccatcatccatgccctcttgtgcctaacactggagctactccacctgtgactggagcgatggggaaggacgtggaagatacagtcagagggttagtgtgccagacaccttacctgcaccacgtcacagccttgtggcctcaactgtttctgggacttttggctgcttgttcaggttccagttgtcactgcagtgactgaccaactccatgcatgtaaaacccgacagcacttcacctcatgaaggtgtacctcccacctcttaccctggagcttccctattgacaccaactcacgagatgcacaggactctcctgggcaactggaaggtggagaggaaattaactccctgagtgatgaacatttgatcagtgagagattgagcagatgaattcttctctgtcttctgatggactgtcctgaggcacagttgtcttttaccaatggccagctaggtaatgcaccatcatattggctctccctccttgcctgccttacttcccttttccctcactcctgcttccttgcgtttgcataccttaataaaggcacctgaacccttgcctcaggctctgctttctgggggaaaccacacttagacggagaggcaggcaccagctgatatagggcctggtaggacatgataaggaatttacatttcattttgagaattaggggaggttattagagaatactgaactggagaatgatatggtctgttagacttttaaaaaagctgactctggttgcagtttggagaatagattgaaggaaggcaggatgagcagtgggcaggctactatcacagttcaggggagagatggatgatggcatgaaccagagtgggagcagtggtggtcatgagcctgtgtgtttgtgaagggcaaccataagacaaggctgtactgagaagcatactgggtagtgggccaggaacaggacccacacctttgcacagcagctgttatggttgaaattcaaatatgtggttcagcaagacaacaaattacaacctaccaaggaccttcatcacctgttgaacatagagagacttcagctggggagaactgaagacctttacagaaacctcaggacatttttattcaaacccatccatggagttccctcaggaggaaggagcttgggttcagctcctagttgaatcaagtaactctccgccttcatctgtttaattcatttacacttagagtagtatttcttttgcagaaagggatgcatggctaaaaatgtactactgcttccattaatgaaaattaatttagcttaataagatgagtctgaatcttggattctgccagccctgagtttgaattctagtttgacccgtttctaggtatgtggcctttaagtttctcatctgcaatatgggaattaacactaacttcctggagttgtgagagttaaatgatttgggtgtataaaatatctgatacatgctctttataccctctttactccactcatagtaaataaatcctgtgggaagctgaagtacggtggggattgaattgaggtgggtgcaaccttagccctcacctggtagacttccttctagagtttaacctggagatactggagcttttgccattaagggaggtaacagatcattacaaaacattcctctggagttattcaggagactagaactgagccctttcttttgagagggtcaaaacagtatcggtttatgaatgactatgatagtacccctgtgagatagtttaaaagaagtgttgggccgggcgcagtggctcacgcctgtaatcccagcactttgggaggccgaggcgggcggatcacgaggtcaggagatcgagaccatcctggctaacacggtgaaaccccctctctactaaaaatacaaaaaattagccgggcgtggtggcgggcgcctgtagacccagctactcgggaggctgaggcaggagaatggcatcaacttgggaggcggagcttgcagtgagccgagattgcaccactgcactccagcctgggcgacagagcaagactccatctcaaaaaaaaaaaaaaaaaaaaaagtgttgttcaatccattttatagatgatagtttctaatacttcaggcagttgtgccttccctctgcaatcaaactctggggcatttttccccttgatgctgtcttcttcacttgctcaaccaaaaataccagctcttgcagaataaatcatcaatttctgagggtggctgatgtgaacaactcatatgaatctcaggcccatcttagatttttttttttttgggaaattacaaaagtattttacatttgttatagaaaatatggaaaagcatatggaagaaaatgaaaattatccgtaatgccatcatgtacaactgatcgttaataatggataaatatccttctaggcttttttttccctacacacatacctgtatgtatattcacacacatacatatacccacatacagcttattatactaatggggattatagggtgcacatcttgcttttgtaaccagctttactgattaataatatattatgaacagtgtactgtgtcattaaatatagttttaccatgtgattttgaataattgcaagaattctcttatgtgattcttatgatttgataacaagttccttattgtttttcacttacaatacaaaaagattgtagtttttaatattcaaatgaacaatccaatgaccagttttataaatgcatcttcatgtgcaagtctaatgacctgataaggagaaattcctaggattagaattattggggcataggctgtgcacatatttatgactcttgagaagtattgccctacctccttcaggaaaggttgtgctaattccaacctcacccacagtgaatgagattgcactcatctttgccaactctgggtatttcagttagtaagaatgtctcttgaacttctcctaaacacagtttaattatgatatatttcgaacatttgtatagaaaacaagagacacccacgtacccactaccaagattaaatacataataatatttgccatatttgcttcatccctctcccattttcaaataaatacaatgttacagatgcattttgtatgctcattctttgttccttgctccggaagtcatcactcctctgagattgatatttcattaccatgtgcatttttgtaattttactacatgtgcatttatgaaaaagcatgtatatgaattttttgagttttaaagttttatttacgtgatacatagaatgtgtccttttgcagcaaaatgaacatttgtttttaagatttaccagtattattacatgcatactgagttcattatttcactttctgcatagaactccattgtataaataaatcacaggttcttaattcgcttcccttctgaggggaggctaggttgctataattttttgttattacagataaaatgatcatcttgtccatgtctcttgggtgcatgtgtgagattttctctgggaaagatacctaaaagtggaattgctgagtttaggaatacacatttccaacttttattaggtacagtagttcccccttatctgcaggggataagacccccagtggatgcctcaaactgtggatagtaccaaatcttataaatgctatatttttcctacacatacatacctatgataaagtttaatttataaattagacacaggaagagatgaataataactattaataaaatagaacaattatgtgatatactgtaatgaaagctattcacataacttatatgggctctctctccctctctaaaattatcttaatatttttggactctggttgactgagggtaatggaaagtgaaactgtggataaggtggggactactgtattatctaacacattgcttttcagagtgaatgtgtcatttccactctgcatatcatatgcagcactcccatttctatatatcttcaacatcacttgagatgttcagaattattaaagtgtgccaatctgatgggtgtgaaatggaatccaattattgcattaattgcactttccctgattactaatgaaattgagcactgaacatatgtttgttggccatttggatttcctcttgtgtgaactgtagattcctatcctctgcccatatttctatgaggtagtatgtgtttttcttatgatttctgagaatcttgtatatgttctagatagaattcgtgagttgtcagtatcttctcccccacatgacttgtctttttcactttgtttatggtgctttttgtcatacagagttattaattttagtgtggtaaaatgtatctgcatttttttgatgatttttgttcatcttctctcattaaaaaattccttccacatactgagataaaaaagaagtcatttatattttttaaataacattttttacagttttgcatatcacatttggctcttttaatctatctggaattaatttttgtgtatagtgtgaggtgggctctaattttatctattttttctctgctatgattagtcctttgactcaacaccatttagtgagtaggcaattcttatctgctgtttctgggcactttattttattccactggtctatttgtatatccctctcacccatgtctcactaatttagtttttataactttgtagttttggtatattaattctccccaaattgtcttggctattggctctttattcatcatatgatttttaggatcaccttgtcacatttcactaaaaagattagattttaattgaaatggaataaatggatagattaacctaagggagccttgccatatttaagctacttcgttttttgttttttttttagtccctgggcatgacttatttcttcttatgtttagagctttcttaaagtccctcaagagagttgaaaatttttctttacatctttaattgggtttgtttttaggtaccttatggttttgttgcttttgcatggtgtcttcttatcattactttttctgagtctttgttttaggtgtaccagaacttgtacttttgtacactgatttcatgtccaccatctttgtagaattctcttactactgtgagtggctttttttttttttttgtaggcaactcttatattttggatgcaggcagcatcacctgtgaataatgataactttgttttttcctttataatccatatgccttttctttctttttctttacttattacattaaccagtacttcaagtccaatactgaatagaaagagtttcagtgggtgtcctagactgatacttcactttacagctatgtcttgacttagtccgtgttccctgtgaacaccaccttacctctgaccatcctgcccactttacgtggcattgttgattagtaatttagttccttttttgtgtatgtattcataaattagacattatatatatataaataaaattgtcattatatccactaatatcttttgctcctcacaccattttcttgcagaccattcttttcttccatttaaatttcctccccaagaaatgtcttatagtacttatttcccctgaacttgtatagtaaactctctattttcctggaaaagtctttatttcgagtcataatttagctattttcaacacttgatgatattattctatcactttctggcctggcctctattattataattaataatctaattgctgcttcttgtaggtaatctgtctttcctctcaggatgcttttaagattttttccttcatatttttggatcttttgatatttcactagaatatgtgtgtataggttgaatttatttttatttatcctccttagaattcattgaatttcttgacttggaggatttatatctttcatcaatactagaaaatttatcctacagatcttcaaatattgtctttctgcagtctctatgatctctttatagaagtcccattagatatattttgggtctcttcattctgtcttccatgtctgttaactttaatcatattttctctatttttatctccctgggctgtatactgtggagtttcctcatatgtgttttcctgtttactgacactctccttagttatatataatctaatagttaacctatctattgcctttaatttcaatgattatatattttattacaagaaattttgtatttgccactttttcaaattatctttttttcatttcattgcattctattattttatttctttacatatcttttctattatttcaagtactggagctttaatcttcttgttctttgtattagctaacttatccttatgctgattatttccttgtgtgcttcaaaaattttgattacaagtcatgtttagtagtgcttgttttccccatggaaatgcagtgtactcaggattgtgagagtagcctaatagagtagttttgtttggttttcttacttgacccaggggtgttattttcttggcctaagtgttcctgaatcccgctgaacatgtaaattcagcccataaatccatgtcacacacaatcctgagttttgatttctcagggttttgctttttctcattcactcagagacagaagcttccttgttatctatttttgctgtagagttgattttcatgcagtttatttaactgaaggtacagttctttaagggttatagcttagcgcagaatcttagttccaacttctgtccacataaggtctaaagaccttatcacttctcttgagtggacattaaaacttacccattaggctgggcatggtggctcatgcctataatcccagcactttgggaggccaaggctggtggatcacttgaagccaggagtttgagaacagcctggccaacatggcaaaaccatatttctacttaaaaaaaaaaaaaaattaagccttgtgtgggtggcgtgtgcctgtggtcccagctactcaggaggctgagacatgagaatcgcttgagtttgggaggtggtggttgcagtgaactgagatggggccactgtactccagcttgggtgaaagagcgagactctgtcttaaacaaaacaaaacaaaaaataaaacaaagcaaagcaaagcaaaacaaaacaaaacacataaaaaacccaacccattaaatctttgttaccaggactagttactgcctatgggacagctgcaatttcaattcacacgcttcctcctttgtatttcaattcctcctagggatttccttttatatctttcaagttcagcaatatatcttttcaaatatatttgaaaatatatttctgtactttatcagtttttctagaaatgtgtagcaagagattttcttattctgccatctttctagtactgaatccttgaatgacttttacaaagagaataaaataggaaagcataaaatagtccctgggaaatacacacagtcctctaagacttgaaactagatgttcctaatggagaggttagtaagagtgccggacacagcacaggggaagatttgaggaaggaagtgggtgagaaacagcagtgcattaatgggcaattactttctgccccctcagatggtacgtgagtgcttagctaatggcagttcacttagaaaagtgatcattggtaagtccttaccagcagctcccaaaaatatcttgcctgaagtgatcgagcctttttaggaaacgaaagatcagattcagaaagcaaggagatggttctcaaattctagtgaagacaaattctagaagaaaagctttcaaagggtgttgttgaccagagaagctgaaggattcaagctttcttgtagctttataaataagaagggaaagaaaacagaatgaaaagcaggggatgagggtacacagggttgagttgaaagcatgagtgtaggagttttcactgcagacatagctgatttgagggggaaacattgttttgcagggcttgtgaccaaatttcttaggatccaaagtgtcaggagaaatcctatttatttgaaatctagttgataagccttaagctgattatgtcaggttgaggtcactttttcttttcagcttgggttgtcccttcagactctgctgtcccttcagtttcttttatcttaaggcatggagccctgtgcaggcctatgagaccatcagaaaaatagaggtgcagctctgagttcactccaactctcaaaggctgtgacttactagatatgagggagaaaatgaaagtgtacatagtgaggcaaatgcattccactggggttcctgcattcctggtcatgatgttgatgagtcctatgagctagagcaatctatttaattattctacaccaggagtctcaactgggaggtgatttgggccccaagggtcatttagcaatgtttggaaacatttttgattgtcacagctgagtgggggaagtatatctggtgtctagtggctacaggccagggatgctgctgaatatcctacagtgcaagggcatcccctatgacaaagaattatgtgactcagaaatgccaataatgctgagcttaagacacccttctctacatgtcttttcttatctgcaacatggaggggttagaagaagaggttgatgtgtgtggctagattaggttattacccatctgtctaacagagagcacttcaacccacatcacatctctagatacatggaggaaatgaaattagttgaaaatgttccccaattttctaccaaagaacaaaatattgtactcgagatgtgagctttgcaggttcacggtgaccactgtgtctgcctccacgcattgggtcattggtcttgtcatgttaggtttgcgagttgcacttgcacctgtgaagggaaggttgaggacaggcttccttgagctgaactgattgtctccagaatggttttatcagctgtagcttctcccacagcaccttcccaacatggtgcagatcctaaggagtccatgtcctgcttgtgtccatttggctttgtttatagtttccattcatttatttatgcatttattcattcatttaataaacatgtattcagagtccactagacataaggcagtgcattagttactatggagaatgcaaagatgaatgagccaagccccttgtagtatagtggggagccaagatgtgtacaccacagtatctgaggcagggtgacataaagtgccagcagtactcagaggagagagagatcacttttgtcatatgaccacaaattgcttcataagggaggtagcatatgggctgggcttttaagtctaaataattttttggcaggtggctatggaagaaggggtaaggaagggagaaagaaaatgagaaatgatatggaggaggtcaattacaaggtgttctcagggaagggttaacagtcctgcttcattggagcagtagtaggagatattgctaggagcataatggcaggtaataaggacttagactggatgacatttaagttttctttcaaccctaagatgataagatcttatgattggatagttatatttgataggcactagaaaactcattcattcattcaacaacaacaaaaaatttattaaaattttttttttaaccagatactgttctaggcattggggatacaacattgtacaagcgcttcaattttattgcactgaaaggtgagatagggtcagagttgagctgtgcaatgaatttttgtggtagaacctggaagaggaagatggatgaggagactctgcccatctcctgaatggaaggtaatactgactcgaggggtggtggtgcaaatggcaaggacaggaagactgtgactgtggcatagagagaaaaatgacagggcttggggaatgcttgttgtgggagttggagtcaaggatgcagccaaagttttgtgcccgagttagggggagactgcaatgctgcaaacagcattagagacctaggagggagctggtttgtagagaaagaggatgagtttgcttttaaacaaactgattcatggtgctgtcaggtcatccaggtggaggtgcccatttgagccatggtgaatatagtaccagacaacaacaaaaacaaaaaccaacaaaaaacagagccgaagataaaggtttggaagtcttctggatattagctttatttgaagccatccatatggatgagatcactgagagagtgcatacatagtgaagaaggcagacaccgggatctgaggaatgttcacatttaggaggcaggagaaggaaaggtgaagaagatgaaggagcagttagggaggtagaaggaggagtttggaaatgctcctgagggaggcaggaagaggaaagccaattcatgctgagtcccaatatataagaatgtgtgcacaccctaatagcctccagggaaacagactttggggtgaaaaaattccctggaacatatttagctgtaaaagtgttgagccaccttatcatgttatcacttcttagtgcttcagccagagggtgaggagggagggggagtggaggaggctttccagtgagtcatccctcctgcatgttaggagttttggttaaaagatttacagagagagagagtgagagagagagagtgagagagagagagcgtgagagaaagaaagagagcaagaaagcgagagagagagcacgagagcacacaagtgagcgtgagcgagctgcttgatttattttaattttttttagagatggagtctctaaaatatttttttttttatagataggatctctgtcacccaggttggagtgtagtgctgtgatcacagctcactgcagccttgaactcctgggttcaagcattcctcccatctcagcctcttgagtagctgggattataggcatgtgccaaaacacttggctaatttatttttatttttatttcttgtagaggcagattctctatgttctctatgttctctattctctctatgttgcccaggctgatctcaaactcctggctttgggtgatcctcccatctcggcttcccaaagtgctgggattacaggcgtgaactgccacatctggccttgatttattttctaataggttcctagggcactgtggcaacaatgccttttcccctgagaggtatataaccaaggagaggacatttggggaccttctatgattgatttttgtctgtgccatcttgttccccatagccttgatggccaagtggctatgtggggatctgtagttcacacaaagcctacagttcccaggtaaagggactttttatcttttcacctttggccatggcttggaggaagctttgggcctactgcttggctcttatcaagtcctgagtgaccccctgctcttctacgctaggcccttgaaactctcctcaactagtcttaagttccaggctacaatttctccttcagcttgtctcttgcaataaggttgtcttggtctgtttttgctcctataacaaaatactctagaacgggtaatttataaacagcataaacttatttctcacagttacggagcctgggaagtcaaagatcaaagtgctggcaggttaaatgtctgtcgaggacacggtctctgctttcttgaatgctgcttcctccagagtagctgatggcagtatcctcacatggcagacagctgatggacaaaaagggcctagctacttctctccagcccttttataaaacactaatcccatccataagattagccctgatggcttaatcatgtcctaaagactttacctcttaatacttctgcattggggattaagttttaacatgaaatttgaaggtgatgcaaacattcaaaccatagcaaagggcagtagtaagatgtagtctctggcatttggcaggcccaggctccaagtgtagttctgtgtgatcttagtgtaggaacttagtttctctgatctttattcgccttatttgggaaatggttgaagctaaccatacctatgttgtaggattcttgtgcagatcaacgaggcaacacatatatagtgcttcagccttccacagatgttggttactgttgctgctttgaagagtttctttgattttttttttaacttaatactcttttggttgagttgctttcagaatttctttcccttttctcccaatgtttttcaattaagaaaaaaatgtaattaatttgaagaaaattataacctaacacctcttagccaacttctgtgcggctcttggggaaataaagggccgtgaatgctttgattatagtgatataattcccttttggaaataagtttgtttttttacatcatctataatgcctggtgtctgtccctgcaaatataacaataataccacccacagtggtgtgacactctgtgtttacaaagaattttcatacatatcaacaatctcagtatcattctgtaaactgggtctttcaccctcagtgaaagtaatcccttttctgatatcaccacctcataaaggtatctgcaccctcatgttcattgcagcattatttacaataactaggatatggaaaaaacaaaatgttcatcgatggatgaatggataaagaaaatgtggtgtatgtagacacacacacacaatggatttttattctgctgtaaaaaagaagtagatcctgccatttgccccaacatggatggacctggaggacattatgctaagtgaaatacacacagcatgatctcacatatgtagaatgaaaaagggaatgaaacagtggttagcaccagtgggtggggggtggggactggaggaggaagtagggagacgtaggtcaaaggatacaaagtaggtatgtaggatgaatgagtctagagatctaatgtggggcatgtggaataaaattaataaaattgtattgtattagagacttgtgttaaataagtagatatcagctgctcttgttacaaaaaaagtaactatgtgagataatggatgttaatcttcttcactgtagtaaccatcttactatctatatgtatccgataacatcctgttgtaaatctcaaatgtacacaataaaatttattttttaaaaaaggaagttgtcttttgacatcacctataatgcctggtatctgtacctgtaaatataatagtaataccacctacagtggcatgacaccgagtttacaaagcattttaatacacatctctaccatctcaacatcattctgtgagctgggtctttcagccccagtgagctggtgactgtcttcaggttttagatgcacgcgtgcgtgtgtgtgcgcgcgcacttgaggtattgcttcttttaacacaaaaagctgaagtttcaaagcaggtggggtgtgggttaaacaccgttctaaatggcaggcctgctgttcatggggagggagagtggcctgaaagtttaaaaataacctgaacattatagactcctgtgaattctacagcccagagcactgtgagtctgtgggtgttttacctgctggagtgcaggcaggaaaactagttgagatgcaggaggatttaaattcgctgagtcctttagtggcatgggctggcagcagaagtatttgtgaaaaaaaattaaagccagaactaatgatcaggatcgatgttcctgaatggtaggaacagtgctaccctttgatttgctgaacaccgcatagtatttgtatcgccggtgcagcagacccttgttttctatgactgaacaactatccttcccccttgctccctgaactcccttactgacctctccagagtttggctgataccttttgcagatagctaactgaggctggcctaccagggagctcagggttgggacattttggatagacttagccattcattgaaaaacaagtaaatggtgtaaaaccatgctaattatgcataaattatgggcaatagcataccctttgaattttgagagttttgaagggttgaaataatttttgaattagcactcagttcttgatctgactcctgttgctctgggatattgcaatgcaaaatgacagcagcagtaggaggagcaggttgggctacgaatgtatcatcacatttggtttatcagtagccccatgcgattcagagggcaggtactacttttgccatttttgcatgtaaggatataaacccaaccaggactgaggtgcaagcctcctggtgttgtttccaccctgataactcatttattctgaggcccttcggcaccatctgtagagtctggatatattcttgcctcttggaactgtagaatcatcatgaaatctctattctctagctcaaatttctattaatgatatcagcgagatgaattaaagtggctaagataatgggttttgaagtcagggtgacctaggattgatcttttgctatgtcacccaccacctatgtgaccatcagggaagttacttagttcctttcagtcttgcttctcttcctgtaaaatggggtttataatagcacttgccacatgggcttattttgagaaataaggaaagtgaatctggttagcatggagccttgcacattgtaagtatttaatacctaggacaaataatattataaacagcatcacctatacttttctttgtaattattctttatttgtttgatccatgtccatttttcttttttttacagctccagaatttgcaatatgaaaatagagattatttaaacaaaggaaagtagcataactggaaactttgaattattctattaatacttgactacatatggaagaatattattgaaaaatatgatccagtgatggggtggttttgtgaaaaaatacaagcctttaaaggaaaaagctaaatcttgagtgcatgtatatgtgtgtgtccaaggagttggcttgtcagtggtgttaggaggatttcagaaattctctcttgattgagaattacatttccacctttccaatttgtaaactgcacattaggaatattcagaaacctgcaaaagagcctgtaattcttcacatttgaatgtactgtattaagcctgtctgaaaacttcccgtagcatgggaagataacctgcatgtttgtacacttggctggcagaacgtgagatcacatcagaatctagtgcatgtctttgcaaacgtgtgtgtcattttcatatgtaattcttcataagagaaataggcatgatgacatttgcctttttgtaaagaagagatagaacgaattaatactgtagttgatatgggttttttttgaagcaggactttattatcttatgtttaattttctgtggaaagggatctcaaaatattctttaggtggggagctgtttccttttaataactgattccccagatcttatttcaactccgtttctaagagcaagaaatattcctcataagacaatgaaccctattgtttaatgattgataagatggtgcttgggcagttagtgtgctggagaagttacccctgagttagaggcacttaatttcctacaagggaagtaaatacccctttttgatatatatttattcctgtttatatcatctgggttgatgtccactcaactcacaagaaacagctgggaacacctggcagcagagagaggcttctagtcagagctagaatgtgttaggggaagggtagctcctcagacagggcccagatacctgattgatgcccaagctctttttcaccaataacagttgcaggagatccatgcattcagtgacaatttattttgcaaaggcttgctatgaggataacataatgcaggcactctaggtaaaagaacaaagagaaagatatgtcctctactcctgagaagcttacaccatagttgaggagacaaggcatacataattgaaaaactaaatatgaatataatggcaaagttacagttatgacaatatcagtgataaaacagtactatgaacgatacagaaattctgtgagtttataggaggtacaggtcagtgttggagagattatgaaaggctttgtgggagagcagatttgaactggaccatgcatagaaggatgcctaggagtgggagaagcagaaaagaggaagaatatttttggggcagtgtgaagcaggcgctgtgagcagggctttgaggcaggaatgggcatgacacgtttgtttatgtacctcatactatggtacgtgaggagatagtgttggaaagataggttgaattctgattgccttgaattgtcaggctaaggtgtctggccattttataggcagtggggagccaccgaagtgatgacaatgtaacatgcatagcaactggcattttgggagggggagcttgctttgaaggatttacaatgacgtcacttttacacatattgagtctggggatgagggacaatccatatgcagctacccctaacttcattggacacctgggtctggaaatgaggcgaaaggtgaggtctaggagctagatgtggtgtggagggggtagttgaaatggcaggtaaggatataatcttgaagggagagaagtcagacagaggaaaggggttggggacagacccatgggtgccctacaggtgagagcagtaagaggaagagaaggaaacggtgagaaactgggagatgtggtggctgggatgccaagaacgatgacctctgaggagagggggaggtcagtggtgtcaaatgctgcagagtggtcaagtaggagggtaaaaaaagggaccatcaggggttcagtggtagtcttagagcaatttctgtggagtggaaggggcagagctagtaaatggcctgcccaggtatatatttcaaaactggccttaagtccatatcatatgggaatgccttcttccctttgattattttatactaggtgggtgtaaccagctgctcagtgtaggagagagtgggagagagagggtgtggtgatggacaggtggtggcttaatctgctgatgattccaacacaaagggttcttggagaggcaggattggtgggtgcagtggaatcttattctctttctctgggccttcagggcccctttaggcttgactgcagctgtgagctgcattttctgttactgcggcattatcttcaagagtgaaatgtagggagtggatcaagaccaggcaagacacgaatccaacctgggcaccttctcctaggcactgcctcctttgggctagcccctgacatgatacctgacacgtggaaggtgctcactgcatgtctgctaaatgaaccaatcggcctgagcccacccgggctgaacgagctttgcaaggtgtgggctgtgttgtgttttctgagtcaagaggccgtgggggtggatggatggatgtgctcctgccggttgttctcaccctctgctcacccccatcagtgggagctggggcgctgctgagtcctcctgctgcactttgccttggctgagcagcaaggttgggccctgagggtgggaagggaggtagacagtgatgggcatgggatcctttgctgtctggggctaaactccgaacctccaaatcaactttcccaataaagcttaatatctattagggtaagcatatttttggcttttctctgggctgaaaggtgacctcatcttatgggaaagaaaggcttgaagtggtaatgctataatcttcgtgatcctagatacattgaaagaaaataaaaatgctgatttactaattaactccatgcatcttgtgtactgcccccctccccaccccccaaaacatcctaaacattcatgctgcaggctgctgctccatgcctccaataaactagctcttcaaagagatctcttttgtattcttcccttttccagctgcctccagtgggaggggatggctccctgctctgttgtctcccagtactctcctgtggtgcactccacatcccgccttgtattcgagccctttgtgggtatgttttcccttctcctcttttgaactgtaagtttttagaggctatgactgtgtctaatttatctctgagccccagaatccctgagaacaatgtgtggctcatcaaaggggattaatgagtatttgttaaatgggtttatgaattcatgaataagtaaacaaacacacagctctctcaggtatcatggcctttgggtctccagacactggtctctactatttttttttccttttttcctccattcctctttctgacctgatctcaggcacttacatgtctctgctcctctgtccatcccccgcacaacagagtgtgttcatccctggctgcacttctgaagttggctttcagaaacagagtctgtagacatgcagtgtttccagtgtgttaccgtggtcacagctactgaaggtgaaatgtacataacaagtacttacgtagcacatacttattgtgtgcaaggtactgatctaagagctttatgcatataaactaacttaattttcacaacagcccagtggagcagaatggtattattcttaacaattaaaccctctgggagactctctggttcaaggtcatgccttacctctctaaagctcaagatcctgcctataacttgactcttaagcaaggaaaatattattttgacatgcagtatgttaataatggtcacatattgtgaagaatcctgtccttattattaggagatccagctctgctatttcctagctctgtgcacttggacaagtccctgactctctgggtgttcagataacaggatgtgcctcacagtccttctgcaaagatgcaatgagaaaacattacggttggcacccaggaagtgatgggttgtcataaatgaatggtttttaaaacactttaaaaccaactttgctgacctgtggttagctgatagcatgttggagtgtggggcttctcaggcttaggtttgagagatgctgattctagggacggacattacataaggatgtgaagttatgttttcacccaagtaagggctgtgaggtattgtgaaagccaccagactcccaagatgtctgcattgccataatgctcctctgctccactatgcatttgcacatggtctcctgccaacttttttcttaagaacccactcccaaatcctctctgcattatgttccttagagcactgctttgcataagagtctatttcttggaaaagctcaacggaggaaaaatagaacaaaaggggctctgataacttaagcataagctatctgagtgtaactggcagggtgggggaagatgaaggagcaggcctggtgggaggggcacaggccatttggatgaagcccacattcacagacttctcagtgatgggtgaaaaatctcttatgaagatggcccaaggcctgacagatctgggaagagcttaagaatgagggtaataggccaactgcttctccaactttgccactcatgtccatctgtcttagtacaaactcccacaggctgcctgatctggggcagtgtggacaccttgttttctgccttttccagaagaggctggagggactacctaccagtccccttcacacctgattgcagctcgatgatacactgcagtagaggggctgcaggataaatgctttgaaatgtaatagtcttcatgggctttataaagtaggaaagttttccacttgcttccttagctcctgttgggtttccactttgcaggtcattgctttcagaaaaacatgtggagcatttggtaaccccatcttaacttgggagggtgtgtgtggggctgcactttccaactactgtgagatgggctggctgcattgtggtgaaatttagtacctcaacaaagtcccataggggagtagagggctgttgacaagaggtcagagcctaggaatatctaagctctgaggcatggtgcatggggtgctgggctgccaagcactcgtgctcagtgaccagtagatggtgctctgacaacaggaaaatacagttactgtccctctgagactggaaagggattttcagatggtcttcagactggtttccaatcagagttatgactaattgctgattttccacatttccatttgtggatccttaataggacagtggaactcggggcactggaaggagaatgcccaccaaattcccatatgaagaaattcccatatgaagtcatgcaataccgcatgactacagtattctggtcatgaactttttctgaggatcctcctggatattgagggcatggtgccaggaacacttggcctctgatcaaattcaatttgaggatggtaagcatagcatttccataggcttagtgtcattgtatagtttcttctcttgataaacaatttagaattaccctattgctgtcctgaagggcagcatgggttttagaaagagccgcagattggaagtcagatgtgttagaagtccacactctgccgcttatcagatgtgggcaaacggcttaacgttgctgaaactctgctgctttgtctgtcaagggtcgtgatacatgtgttaccaggctcacctcagaagtttggagtcaggctcagctgtggggcttatgtaaactgaaaactattaaacacatgtattattcaaccattaaaattgtagccactggcggggcgcaatggctcatgctagcactttgggaggctgaggcaggtggattgcttgagcctaggagttgccagctaggacaacatagtgagaccgtcgtctctataaaaaaaaataaaaacaacaactgtagctgccttgggggctggtagaatgggggattagagagtatgaaaccagtatagaaattcatagatctcaaagctctcaagagctatgacagccaggtgggggtggaagatgagagtctgtcttcctgctagcactgctgcccttaggccaagtctcttcacaaagccatttatgccattatgtttgcccctttcctttttggctgcaccctccaagaattatcccttttaactcacataggtgctgaaactccctaaggtattccacattaattcccaacctatgcatttatgattcctgtctccttggaaggcaagaaggcagatatcaactccagtgtgtcgtcgcatttgcacatgtagtatcccatcttgagtattctaggtctctgaagaattacaacagccaaagagaatacaggacgtggaatactggatctctgctgacatctgataacactgaagagacaagtcggggatctctgatgttccaagaactaagtctgggaagtaaaaggctagtgagccctgcttattctgggcattgagaaggtatgccgccagcctgctgaggcagaaccacaaaggaaaggggtgaggtgacagcatgagagtgaagttcatgaagctttctggcctgcaaggttatacaatctagtataatctagtgtaaaaagctacatgatttatgtcatcacccatcttgttcattatagtatcctcagtgcctaaaacagtgcctggcacctggaagggactcaaagatacttctctaatgatttgaatgaattttgtgctatggattatggtactgtctgaaaggagcgacatacacttaataatttctgaaagccctttttctaaccctatgtagtttacagggataccgagatagccacttgggactagttctaagtgactggctgatgggacttcatggttcacagcaccaccctccctccgtttcacgactgactaggtattcagacagaagaggaccctctgattaaagcaggaggaaggacagagtaaggcagtaatgtgaaatcaaagtaacaattacagctgactcaccttgaatagtaatttcacctgaaatgggctcccctgaatccaaaggtcaaatgccttccccaagggcagcaggctggacatgttgagaccattcctttggatttccagtagagaattttcctacacacacacacacacacacacacacacacacacactctcacatacattctcacacaacagacacatgtcagtgctcacagggccttgcccacagacagacacatacccgtagaaacacacatgccatgcactcagacatcacctcacttctcaacagttaatctcacttcacaggcgtgaagccatactcacccatggtttccaacctctgggctttggtcagtgtctgtttccttcctcagcccctcctttccttcttcccttccattgttcgggttggaaggatttggagaggcctatgtgttgagccaaggcaggaaaacacagaagacggtgtgccccagctagtgtggacatgggaggggacagctggtccctgccctcagttcaaaccaccagtcacctgtggggaagggcttggcggctaaacaggagctctttccctggggcttggagtccacctttcccacctctgcagctcagataccaattctatttttttttttttctacattaatgggttgggtttgagaaagtccgtggagcttatttgggagtaaaggatggggggcgggaggatccttctgattgttcgcatttcgagaagggtagttttagcccataactcaccatggagggcccttccaggagacgtcgggcagggctttcctacagcggaaccgggaggccgccccgtgagggcagaagctcccgccaggagccagcaccaccagcagagtgtggaacccccagaggtcctagcctcctccacggggcctcccaggtgctaagtggggagatggggagagggttctgccctctacttggaaatgcctggccgtgttcgtggagcctgggaggtgcggaggagcggcgacgcggccatggcgctaggcgcgcaaaggccccgacaccttactagggcggcggcgggcccgtggcaccgctcccggcaccgaacagggcacagcactggggacacctctctgcagggacccaagacgcgcgtgcgtgtgcgccccacgccaggccctcgctctcttgcggagactccgccgcatcgctggctgcacctgcctctctcttctcggcattacttgggggaaaggggactcttcactggacctttgcagaggtggctgctaccctttggccacataaatcaagaaggcaagccagcctcaccttccaggaacctccagccttccggctgcgtccccgcccctcccgcctggccagctcctcccccgcttctcccagcgctcttgcgcgcctcgctgcgcctctgcgcgccgctcgctgtcctctgcctcgcctccccattctccttccgcatcttctccagtgctccgccgagggcgctgcctgcggggaagagggagactgagccgttagtgaggaagttcggtctgtggacaagtgtggtgccaggccgccgcgaggctcggctgcaacctgttcctcgcccgccggtgctcgccgcccgcccgctcgcactcccgccctctcggcggcgcagccgcggatcgctgttgcatgctgatccggggaggcggcggtggcgagcgctccgggcggatgctggcactcaggcttcgctgctctctggatgctgctcaacttctagcccaagcgcaggagctttgaagtcatttgtcccttttcgcttggatcgacttcttattttgagattttgggcattgcggtttacgcaggaacctcaatatcgctctccccacctccctccctctttctccaacctttggatgcgtctctgctggcagatataaagacccaagtcttcgcggtggaatttcttagatggacttgcaggggctggcgttataaagcatgtcatcgtaaccccgtcctcgtctttgtttatttttttttaaagttcttttgttttcattttcccctccttcccaccccttcccccaaccaataaatcaccaaactgttacctagcgggccggtgcctgcctctctccctgaactaggtggtgcgtctgccagaagaggagctatgtttgaagagcagcctactccacccctctcctctctggtccctgaacaccaccacacactggcattttgaaaaaaatattttcctccagaaactgggcacccccaagccctaccacccgctttttttttcttttttcttttttttttttttccttcttgaggaatggagcttcgcagaggttgcatttagattcaacagttcacagcggcgggctgctgctgctgcctctccgaagagctcgcggagctccccagaggcggtggtccccgtgcttgtctggatgcggctctgagtctccgtgtgtctttctgcttgttgctgtgtgcgggtgttcggccgcgatcacctttgtgtgtcttctgtctgtttaaacctcaggatggctcgcttcggggaggcggtggtcgccaggccagggtccggcgatggagactcggaccagagcaggaaccggcaaggaacccccgtgccggcctcggggcaggcggccgcctacaagcagacgaaagcacagagggcgcggactatggctttgtacaaccccattcccgtccggcagaactgtttcaccgtcaacagatccctgttcatcttcggagaagataacattgtcaggaaatatgccaagaagctcatcgattggccatatcctttcttgcccaccataactccctctccccctttgcatttcttcgggtgaaggggggtacctagcatggaatgtatcccccaccccttcctggtgccaatttgcccctttgctgaagcacactcttcggtgcatctaaggggcaagcttggtgccgtggagacccgtttgggcactagtgtttttcaaggtaagacttttggttttttatttttcctatgtggaaatctttagtgtccctgggtgcatccctttctgggctgggctttgtctgattcccagccccctccccacccctactcccttcacatgccgccctctacatagattgggttgccccaatgcttcctttcataattaattctcattttcctttctttaagccagccactctgcccgtatccccaccaaccaggagacaccgcactgtcttcctgtagggaagtcaaggctccatgaggggatttatcagttcagaagttcccagggccaaaaccctgtgtacagatagacaaatgaataaataaaacaggcttttgggtggggactcagctaactctagggacttaagtttaagttccactgaaagtggcatgagtgagtgtctgtcaggggaggtgatctctgttgccacagcccaaggagctcaaacttggagttctcctctcagccaagaaagagcagctcatcaggcccatcctgtccttggtccttggttgggtactcttgcttcttagtgcttgacccagctgattgctctcccagtatccaggatccaggtggatcggctgggcctgaattcatccgctgaggccagaggtgtgcatgcagtctctctctccctagctccaaaggaactgctctccccaaagcactggtgggggccatctctgatggtggtggtgtcagggtgaacaggcatggaaggagcttctttgcaggtttaatcaagtgcaccaaatgcagactgctgattaggcagctcactgccttgttcttcactaaggattggacgcctggcaaggccattgggaattgggggtggtgaggcagtgaaggggattagtaggaggcaagctagtggtctggcgttaaatatggggatggggttggagacatgggactttgggagggagatttgggagggatgcatctgcaatggaggccccttcttttctcccctattctccctctttcccacccccaccgtccaggtgtgcagcagtgaggcagctggagctgccttgggtctctagtattagccagacacgcggctcatttcccccagggcctgggcatctccctactcccccaaccccagtctctggccttccccttcttctctagttccctgcctcagcagctcggtgattggctggcgcgtggtgcttctaggcagcaccccctcattagaaacgaaggagcatctctaagcagatattcttcctgctgctgttcgcatcctcccacagcaaccccggctgggcttctccctctctcctctctgcatcccgctcccctgctccactctcacagagtgatcccaggccatccattgcctgagttgaacgtatctagctagggtggaggtttcgggcgggggaggggtcgggtccctgcagtcacgcctgccggtgcgctgcacaaagcggacagatctcattgtgttgtgtgctgcggctgcaaatattcctctaggcagtctacggatttcccagctgggccctcctttctcactcggcttctacggttctctaaatcttcccatccaccaggtgctgccttgctgtgcccctctcttaggggcgtgtttattcagacaggcgccctcccgtttctttgcggtagacaaagccgcccaaccgccccgcgggtggcaaagtgtgccagcagccatcgttggcacctcggacagcgccgctgaaactcccggcggcccggggctccccagttacccgggttcagcacctcgggtacttctggccgggcccagccttggagctgagaaaccaggcacgtttcctacaccacgtggtcaccttttttcacgttttctcttccgctgcaaagacaccgcctttccaccaggcgttgcgagcgcgcaaggtgcggctgtgagtcttactcctccctttccttgtctttggccaaaaatggaccaaagagagtcaaacgggagactctcgagggagttgatttcagcatcatgctcagtgccttggccccgagccctgtcccaatggtctcttttgtctgcatagttggaaatttcacagtggttctacagcatgtaggctgtggtaacagtgttcagggaacatctgctaaggtgtttagtggagccctgttggaaaatataaaatacaccatgtacaatgtaattgactaatatattccctctggtggtgaccacgtggaaacattgggcttccgtgggaaacgcacctaaattcctagtctcaccttcctttcctttctaaacaaataacttcccaagtatcttgctttgtcttattgggagtcagtctgggtagtggttgcccataaagctttggagctaggctgcctgggttgaaatcctagttccttcaccagctttctgaccttgaaaattacttcattactctgtgactcagtcttcttacctgttaaatgaggataataataataatactgggagaattaaatgacttaatatatatcacatgcctaaaacattatctaattacccagtaatcactagttgttattattaatggcatctttcagaaatttcagcgtgcctgaagtggggaggggtcttagttcaggtgaagtcctctagattcttgcctctcaaagagagcaaggagctgcatccacatcacctgggagcttgctaaaaattcagaatcctgggccccacttcaatcctgctgaatcagaatctgcattgtaatgagatccctgtgtgattaatatgctcattaaagtttaggaagtacttctttgctctttgtaagtgccagatttttttttttttttttaagaaaggaaggttgttcagttgttcagaaaacatgtcaagacctgctttcatattgacatttgcacatttagcatgcttgaggattttgtttgtgttacaacacgttttgagacttacactttcattggctgcagaaagtcactgtaggacgagggggataatgtacacttctatgtgccgcattagtggtctcatcatgctgtgcattactggtctttaatcatgtttgtctgaaaagattggttaagtaaaaggaatggtttaatttatgcttctaggatcaccccgacttggagggggagggtaatcttatccagttattaataggggaggtctagttcttatgggaagaaatgctcaagataacccagatttggcatgaaagatggtggcaagtcaacagcctactctgaatgtgtttcatttttcttggaagctacatctgcatagggagataattttattttcttatggcactttcctctgcagtggataccatactctttttaaaaatgctaatgtgatttaaaatgtgatgttacattctatacgattcctcgttttcattttcttttttgctcatctaatagatcttctctggcagttggctgttctgagtgccctcccatgttcaccgtgcctcatgcttaccagctctcactgtttcatgcccagggccagttaccctgtgggccatacagcatctctcatgtggtttgcaggatgccccacacttgtttgaacttttccaggtcacgggtgtgaaggcaagaagtagtgtgtctggcttggagactctatgccagagttgggcaataggatattccccccacacctccatcgccttggttgtctcagcaggggagaacatgcttcgtgtggaaatgaatatggcttacagtaggaaggtcaaatatgtttgcagccctgagataatgaagctcatcacaatgaacctgtggacattaatccatgatttcttattgtagagaatttcactgtatccccaaagcactctggctatggatcagaggttgtatgctttactactgtgaatctcccattgtaaaatgtccgtttattttggaggattttggtgagggttaccaaaagttttagttcttaaatctcccattttggtgtcttcttttcttctgcttttgttgcctataaatgtatagcacattgcaggatagtagactgaggtcccggtaagaatttcaggtttgatgtaactagtgaatcatgagtcaagatgccttgattagggaagatgatggcagctaacaaggatgaagtctgtaattatatcctatgatcagataatgcagaggggttcatatcttctgtgtacctgtgcgtggatgcagatggtgaaacagatagtgactgcagctggtactggagctgtaggagaaagttcttcattttctgagcatcccaggacaatctctgaattgcctgttggctttgcttttgatatgaagtgtgggtaatgtttcatgtggaaaccaggccatgacttgttgtggggaccatttataattgggatgaagcctgaaaaatgagttggagtgaaggaatttgacagaaatgaaatgacttgaggatagagacaaaaatatcctcaatgtgatagttttgtctgttggtttgcatgtcattatttctccacttccctccacttgctttttctgcaataggcgcagtgcatgctatgaattaaaggaggaagaggaaagtaatgagaacaggcctgctttttttttcttctgaaacatccagactctgaaattattagctccatccaaaattacttatctctttatagcactgctgtacaaaatgtaggtgtttttccccctcaaattctgctgctttcccccttctttataggaacatctggtttctttcaatcttcatattcttagtgaaaataaaactgagtgaagctttgctaagctctcagaactcttgcaaacccttgactccatgtgtttgatgagcaggtcagccacctcccttacgtcatgcacagggctgcctggaaagctacagctcaccaaacaccaaagcccagatgtgcaatccagtccatcaatggtgactctgctgatcttattttgcttatcactgaccacaaagacataaaagaggaaacctaaatgcaactctaattaatatccatttattcagagagagagagagaccaggtctttactttctctttctgcccgtcttttcatctttctatatttctccctctctcatttttaggttcagcctttgtgaataattcattatatgtgtgggtttttcctaggattttcagaaaaggaaggttatttgtcttcctcttgggtaggattattaaggtctctcacagaggaccaacttcaggaatctactttttctctaagacctttgttttctgcagtgggactgtcacacaacagaaaggaagctggggagaaatcttgtaacctgctttttcttgtcatttttatgatgactgcctcctacccagccctgttacatttgagtgcccccaaaatatgcaactactagccttttctactcagagactgtggttaagtggaaggtacgtgtcactctgaatcctctcatcatcttgggttttcacactgataaatgctgaacgactaggctaaggaacagtcctctgtaaccatttcttttcaaattccagtgtgaatttttacaggaattacagggagcaggggtagttatggggaccaggcatggaaattagtgtctaacactccgccaccactaccaccaccacgatgtggcttctaaagcagtcccttccacagagggatagaaacatgaggggcttggatcaatgttacttttcccaagccttctaaacatgcacagagaggatgcacgtgtgggttcacccatcagtcatgtttccagcatcaatcttaattaaggacagaaggtatagcacaaagtttttagactcccccaacctcgtggtttcttagtgttaaggttattgcagagagatgtttatggtgtatctttgctcactgagcaccccaaatatgtttccttataaagcttgacgagccccagtgtcctcatctctggaaagcagggagcagctagaagatgtgttcttataaggtgaagatgggccagattaaggggaacagcaatgaatgactttaaaatgtgtcggttatccaagagatcctccctgccacctcccagagcagtgggtacttcttaggagcttcctttattgtatcttgagctccaaatttgtaggactagatagttccacccttaatcctcttacttattaaaaaaaaaaaaaggagcctcaaatagacccatttgtaaagcagtagttaatcccagaagcaggtgggtggggcttgggaatgctatgcccagctaggctccagccacgctccagccacgtgaggcttcagagagaggccctgcctggcacctgtgccaagcatgttttttttttttttttttttgcctgtgggtggttgatttgaatcactgttgcaactctgcataatcttgaggctatatttttgtgtgtgtgctgcattttgtcttttgctgcatttttgctgcatttgggctgcatcggttctcttcatctctggagaatttggaaagcctccttcagatatatgcctgagctttccaaagacttgtgtcattaaaggggggtgtcatctttcttccctttgggggagggattaaaaaggatgtagctggatggtaggtagcaggctagaggggaaaggaagaagtgctctggtgtagatcatgggtggagccttgatgatactcagtctattatggcatcattgctgagatgcaggacatcgtgcgtggccttctggatccagagcggaggctctgaaaaccagcactaggaggaaaattaatactctcgagcctttctcagccttcagctttgctgtaggttggaagtttttcaaactttctgtgcctctttctcaatttccacaccattgtctcatgggactggtcagagccaaaaagcatgaaatggattttcaacagtcactcactaacgtcctggcaatttccagctgtgttctcctgggaactgttttgctgcttttctatcagcgaccattcctttcagcagatgatttccatcaacatcaaggctaattcctcatttagttcctttgtgttgatgtcagacataggcggtctgcccgtttcatctacactactggctgtcaacctgtgtctcagaatcacctggagggcttgttaaaatacagattactaccccccactcccagagtttctggttcagtaggtctgaagtagggctggagaatttttgttggtcacaatttcccaggtgatattcatgctgctggtcttggacatcatgctttgagaaccattgctgtacatggttttgttatctgcctggcaatgcctttctagaaggccagtcttacaaattgctgatgcatttcctcatcccaaatctctctcatttaccagctaaagccctgctgctaacaaaagcttatgctttgggtttggatagtgaggaggctttgagacttctctaacaaaatgctgatgaccttgagaccagggacatattaagcaaaatatatgtcattatcaactttgagttagtttatcttgttctttcaggacttatcactgagagcaggctcttctgagaagggacatgcacccatttaattccagcacctagcacatgctggcacatggtgagcattcagtaaacttttgttggatgatttatacccaaattggctactattgagttaacaagcatcaacaaagtgcctcatattgccctgaccaggacctgtaagaccaggtgtagccccagggaggggacaggaggttgccaggaggtggtgtgagggcagtggatggctgggaggggagtgaaggatcatcacatgggaattgggaggctgtaaaagacaagatttagctacttcataattttcctcaggattctttcagtttctgtattacttgatgcaggctttctcacggaaaacaaaacaaaacaaaacaaaacaaaaaccagggtatttgttatctggcattttgttacatggaactctttattaattggcatatagtataatgacaattgagatttgtaatggtgaccccctaggtaccacagaatgttggagtgctttctgaagagcattcattgtattatattcaacacagttccaatggtgtgtgcacttcattgtattttgagctttgtgtgatttataattcatattgattatataagtagctcattaccactttttttgttcaattaaccaaagtgttcttctccagctgtaccagatgacagaggaattggtatgttgttctagaaatcagaccttttagttctagaaatattataggagctggaggtgaatcctggtgcaattgtcatgtatcaggtgatatttagaacaaagtcattatttcaaaaatggactaatagctcagcaggctttagatttactgggcaagttccccagctggtaagctggtatcacatctaactgggtgtgtttgtttctgtaggctaacactgaaaatgaaccaccaagatttccaagagagctttcaataagcatctcagcaagaggttgtcagatgataccttccccaacctgactctgagttatccaacttttatgccttgggcttattttcctgctcttttttactcccacttccctccttcctgaaggtcaggagatgttgagctctaaaatgattctgttgtagggtgatggtctttaggttcttcagggtcagtttgaaactctatggaacttcagagtatgacctgaataaatgtctgagtagtgacctgagtaagtgtctagatgacctcagtaagtgtctagatggcatctagatgactctttttggagtgttgggaccattaagtccctctagtacagtgtttgttcatttgctttctatactgggatcacaaatcctactgacatctggttgatgctatagacctgtctctcctgaaaaatacacatacaattttgcattcaattttagaggtctatgaatcacaatttaaaaacatctatcatgttaaaaaattcccacaatttgggatgttgggatgctgggctatcaggagtagtgattctcaaccaaatatcaaagcctttatgagcaagtacgacaggaactttatatgaaggaactagagagatacggttgcactgggctgtcagccaggctgctatgaaagaacacaaacattctaaccaaagggcatgaattcaatacagaaactctttctacatcactgtgaaagacgactgtcaagctggaatacctccagtgacagggtgctcttctgttgttaaaaaacttaagatataggaagtggaaatattcctccttatagcttccatttgttctttcccttcctgttttctgttttgtaaaacaatatagactcagtctacttcctttcacttgacaatactatggcattgaacagcacagttggtggatttttggtgatgatagacatggctcttggcacatgtggcccttaaggacttgatatgtggctaatgcgactgagaactaaattttaaattttactgacttaattttagttaagtttaaatagccacatatggctagtggctactgtacaggatggcacaggcagagggaatacatgatgagtcagaaagcttaagctcccctttggttctgtcatttgttagccttgtaactgggcagggtctccttggcttggtatgcagggcttctcatgagccactctgcacattgcgccagctttccttgaccactgtaatcactgtctctccagctgcttcagtggctgctgatccctgaaggcaccatcctcttccaggcctccgtgcctttgcacttgctgcttttccacctagaatgagtctggctttaagattgtactcagaggtcacttcctctgtgaagccttccttgatttctcttggccgaataagaccagcttcctcctttgggctctcatagggcactttatttattactttgttgtatcacataccacataattttagtattggtttaaaatccctgcaagggaggggggacgttatctaattaccagataataaggcaatgcttattaacatcagcatttaacacattagtttgaattaaaatactttttaaagtggtgtttttttttttttttaaagaagtggcattccgtttctgacttgagatagtcagctaaaatctctgaatctttttttttatatgaattgatgacagagttagttttctctcactctgttctcattcagtttaatttttgaatctagattcaggactctatgtttatatcaagtatattttatctccttgcttttgctccaatgtttatcctgcagagatccttttcaactgagaacaaagaactaacattcattgagcatctaccaaatttcaggctctacttcaaacaagtgtattatccacattttaaatatggggaagctgaagctaaagaagattaaatcacttgcccaaggtcaccaccggtgagcttgaacaagtggtccgaatccaaagtttaagtgatttctacaccgcactgtctatggactttgctgtttcatgagtgagctccccaccctaagtgctatgtcatctgcagatttataagcaaatacttaatgctttcatttgagtaattgataaaaaatatatttagaatcagggaccctctttctgcttatcatcagtgtattagtcagtgtgcgttgaccgttcagcttttctcaagtattctgaactgtgctttagcctactgacatttctgtattttgtctgtaaaaatattgtacgcgatattcttgtcacatgctttactgaaatcagtacacactttcatgactacttcatgtctattttaagcaggaggtagcatcttggtttctccaaagtccactttaggtatcattttcagagactcagacaatattttatttctttcttagacaataaaagtgttgtgtcctagatctcaggagttgaagggatattagatgtcatctagtccaatgcccagttgatgaaagcttcaccttagagttcaggatttaccagtctctgcatggaagctttagggtattagggggtcgttgttaaaaatgacctctggattcaaatctcagtatcacctctgtcactttatagctgtgtgcctcaggcaacctgcttacccttgcagtgccttggatttttcaaatgtaaaacagagatagtaatttgcttctggggtgtatcataggatttttgtgaaggtcagatgagataatacatgcaaagtgcttggaacaatgtttggcaaatagtaagctgtgaataaatcttggttattagtatatggttaatttcagatacataaacattaaacttctgcagctatgttttctctttccaacaatgctgtcctacttcctcctggctcttaccaagtttctaacctgagtgctgccagataatgtttacgtgaccttgcattggtttcatcacctccctgagcctcagtgtcttcagatgtgaggtggaggtcactttccctgctttgcctgccttataagactgttgtgaggttagcattggctaatgtgtatgaaagccctttgcaaacatattaggtattagtattagtgttaatgttgatagaatttataaatatataacacttattgaacatttactatgtgtcagaatactgtgctaagtgctgcccatgagttattgcattgattcttcatgacaatcctacagagataggcattcttgttttctgtctttcatagttagaaggattaaggtgtggagaggttaactcatttccctgagatcgcacagtaagagctggaggcctggatcagaactcgtgctcttaatcactgaagctaaatagtctttccataagactttttttcttccttctcaaagttattgggtttacacttttaaaaataaaatttaaaatatctacatcaaaacctgtttcctttatatgtttctaatgctgattttataccagtattgtacctaaggacatatttggatttacaatcagaaaaaatatcttcaggagcaataatgatgcagaattttcccagaaagcttttgataaaaacagataggatacttaaaatgatctataaccttaacagactcacttgattttgtctttgaacaaaaatggtagcaaaaaatttcagatggcttgatggatggcatgtagaaggatcccctttagatccttggcatctgggcagattttcttcctgggggttgccagcctcctggctaactacttcctatctgcttaggcttcttgggtatttagggcctctatgtttgttctatcagataagagagaaaagattggaattcattaactgtggaggaagcttctgaaagggttagggtgctgtggggggaaggggaaacctccattgcttgggactcttggaaatttgcctaatgagcttggtgaaggtcctctgctagggatattaggggcattttacctgtgggaaatgtttactggtgtggacgagaatggagaattaggatgcaccacttggcttccggaaaccagacagagcactcaaaagaaattaaggagtgggcctaaaaagttaaaggaactgcctctcctttctgctaactttggattgtttttgcatggaaatttgtatttgtgaaataactgagccatatggatgcacaaggatgcatgtgttcttctagtctgttgatatgaggagcagttgaagggtgtgggcttgtctggaggtggggtgagtaggtggatgtggtaacatgaggagggagcaggtctgaggaatatgggcctatgtcaatccgaggatctgggcattttggcaagagcaccctcccttctcatagagaggtatttatttatttttgagatcaccatctgccccaccacctccccccacctgaagttctatggataaggatgttacatctctgggtaacctctttccctggcgatgattaaagagtaacaaatgcccactcagaaagactgtacaggctgagaaagactgagctcatttctgtcacaaacatcagtagacaggctcaggagagcaaagcaaaggaatagattctaggaaattagaacttctaacagctttctatacttccactgtgaaaaaggctgggtgcagaacaacctgcataatcatatgccttaccatttctctttttatcttaccttcgtgtctttttatcatataattttaccaccattctataaggacctccctccaggcctggagagctttctgttcctcaatatgcatccctgagaatggatggaggaaactaacctttaatgaatgcctattgtatgacaggcactctacagtgtgctctagaggagtgtatcatttaatccaaccccgggtgaagtggatattgttctcattttatagatgattagcttaaggtcacagatagatgtggtctgactggtgccactggctgctctctttccattgtttcatgctgccttgggttagaccagaagaccagcaggtactcttccctaacagagtatctttttaggatgacactgtgaactacttgcatgcatctgcagcatcactgggtatgaggctaactcatgaaggagtgaaggatcagtagatggaagaagagcaactatctctttcccatcattatggtcatcatgaaatggacctgagacatcctggcctgggtcactggaatgcgagcttgagtcggaatctgagatctttgctattttgtctttcccccgccaaaactccactgctgcagttcctttatctgtctgcagagcgcgtttggtttggaaatgccagttcccctttcaatattagcatggaaagtccattttcttttttccggttctcagagaagtctaccctcagtcctttctgttctggggtacccatagtgtgagtcatagtgtggaggtggcagctttcatgaccttctcttgaaattttacatactgaatgcagctttttaaggaaatgagggttgggttatagagagactgcagaaagactcttatatcctgataaagactatagaagaggcttatagtaggtttgtggaaaagggcagcttttccacaatggttcacttccaggccaccattgtgaagattctagcttttctttaactctgttagagaagctgctagcgaatccaactggtcatggagctcctatgcttgacaatttagaagtatttccatggactctagaccctttcaagatgtccctgggtgtgccaggatttccatttttgaatgctattgtgggatctcctcattagtaatttcaccaaaaatggcttctctcagttgtaatcatgtatgctctttctttctcctccatttcccttcccatcatgttcctcattagcataacagaatactagaatattagatttatagagaataaaaagaaacttgaatcaaactcacacttatccataagaaaactgaaggccatagaggttaaatgatttgcctcaataagtggcagagcagagcctagaacccagggccgcgaccaagtgccagcatccttttgtcacattttctcttctttcctctgtaccctttctgtgctcaaccatcttctctctagtcccttctttctcttctggggcttcctcatccttagcaagtatatgtttttggtgtttggggcataggaggctggatataaggatcatgactaataagaaaggacttacgtaagaaaaaataggaatggataagagaaagatattcatagaggtgaagccaaccagcagagatccagtgagaattggtaacagtgactcagaaaaatggttaatattcttctttcccaaatatgttgctggagaactttgtgaaatgataatataaaactcaataggcaatggacttctacccagtgtaaaaccaagagcagatctcagcagatgggagaatagatggatgcttaggcaagcactcatctcagaatggttgctgggctcttcagtagccctaagaaaggcaaactatccagactctgccctgagaggtagctctttgagaacaattgagtactcctgggaaggaggaagcagctcaaataaaaagatctttagatccctttcttttagaattctctattggagctaagagaccagggaattttatttgattattctgataatagttttcccaagcttttcagggtgtagggctgagagtacagagaggtttctagccctggttctagaaaaatctcattcctttcctggtctcagcatctacatctgtaaaatgagtgtgttggaatagttactaagactctaaggtgcctttcagttcccactgtagagactctgggattctagtttccatcattgttatttcagctgattggaggacacgattaactttcttggtctccagcattcgaagcctggctgcacattagaataagcctgggaacttctagaaatgctgatacctagactgcagccaagacaaattaaatccaaatttctggagataggacccctgtattcttaattttgaaaagctttccaggtgattctatggtccagccatggctgagatccactgatcttctagaccgaggggagccagttacctgacttccttctgtttcttttgagtgtactttgattacgtcttggctgctccctctcagttttcttgcaggctatggtgaaatagcaggagccgcctgggtgtcttgaaatttagcctgagagaatggggtgattaattcttatgtgtcactgcattgacaaagccattcacctgtggctgcttccgacacacctccagctgcacaggtaacagccttctgtgatgagggggatggaccagacatcctgaatgcaggtctggctgaggaggccatttgaggctgaaggacagagtaaggctcacccaggaggcccttgagcaagtgactaagagttgttgaccttgcttcctacctggttggttcaccccttatgcatatgaaggttgatccagcatgactaccattgaatacagcagtcaccgccttaacatccttgacactcccctggggatgtggaactcacaataagtgctgtgctgaaactggcttgtcccagctcttgagtgtcctctctgtatgtctcttctagactccatgttcagtgatatcaagatggtagcttgaaattggccatggagagagtatttataccccagaaatttgcaaatgctacacattggggcttttcccccgaagttaaacatctattagcacaacacttagttttctacttaacaaaatagtccattcacttgtggaacagtggaagttcttctctttattgctccagatctgtcttcggatgggtactctgcacattgggtcttagtctttgcctccataataacttagaaaacatctgagccccttattacaagctagcccttcagatatttgaaagcagctgtgatgtatttctcaagtcttccctttccaagctgagtatccctagttctttcaacattatctcacgtggtttgcaggctcagtaggtgtctttgaatgccagggcacagttgcagagttttcagaggaaaacaaacattctcccacaggtgatctatggactctttcacaaaaggcttttcatttttcttatgctgtctcagttccatgatgctggtgttgatatgaagtggggtgtagtcttgggtggggttgctgattgcacctcatagtcatcttccctgaaatgcacgttgctgccagaactcttgatgggctccaattcatcagagtgtcatcaaaacacaaattctcgtttctgaaacaggtaattttcccactgctgttttgttttcttccagaggcttttaatgctccccttttcttttttcccttttctgtagcgttcaatcatttgtctgctgttcaccaaaactgtgtgttgaatgacagcgttttgagtccaggatccagtcacacgcaaaacaaatgaatttgttaagacttatccagctgtctgtaactgcaaggggcatggcagtgggaggagggagggagacagtactgtcttattttctcagaaccagcacttcccatcctttgggaatcagggcccagatgagtctggaactgacctcagtgttggttcaccaaagtagcaatcatgtgcacttcctttcagccactttatccagagggcagggtcctgggagtcagatgggagttctttggtctaaagtaatgagaatttggacttgccttcacagccagcattaaatgggtaatgcttaggatcttttgctttgagtaactgagtccactgacctccatgagagagcagcaggattgtattggcaaacaaaaggccttttggggagttctctgcctctttgttatgttctcaatattgctttatttgtctttcattcattaggtttttaggagtaggtgtgatggcatttccatcttcttgacagcaggagtggggaagagagagagagagagggattaagaaggagagaggtgtgtgtctgttcaggactgcctgtcagatggtgaatttgaacagaggcagctgttgtcatggcgatggcaggttgcatcccaccaccatggaaaccaaagttaaaaaactgatgttaaggctggaagtcacatgatacatttttgttttgttttgttttaaaaaaagaaaaggggtttggttttttagtctttttttttaagatgaggttgggtggtgagaaaaattgcacaaggaaagcaatgagatgatgacatgggacagtatggagtaggcagagccttctttcatgtttttctgcttgttgacagtgcatgtctcctgccgtggttagagaggggatgggaggggtatgcagggtggacttccaggtttgcagccagagttgtacactgctaactgtcacatggagaaacacaggggtttagccctcttgccctttggaggtgatgtgtggttcaccttctgttgatcagcccagaacagacccaggaaacctaaaagtatggactacccaaataggaagatagtccatatattgataaatttggaaggttaacatttattttcagagaattgaaaagttcatctatagctcctcagaatctccaggaatagttctgtctgtttattcccttttctgggctggtctcttttgggctgccatgtcctgccagggcagccataggagtgagtgcaaagaagtccagaaggagccctgggccaagactccttgcaccatagcttatctcttaacctgggccctctcacctgggcagggtggagcggcttgctgagaggcattagaaagccctcttggctctccatctttttacctcatactgacttctactttatgccatgatctggagaaaatgtgaaacatccctccaggaagggagctggactggccagggctgtttttgcttgcttgttctttttttgttttgttttgttttttgagacagagtctcaccctgtcccccaggctggagtgcagtggtatgatctcggctcaccacaacctccatctcctgggttcaagctattctcctgcctcagcctcctaagtagctgggattacaggtgcccaccaccatgtctggctaatttttgtattaattgcagagacagtgtttcaccatgttggccaggctggtcttgaactcttgacctcaagtgattcactcgcctcggcctcccaaagtgctgggattgcaggcgtgagccactgtgcctggccaggccaggcctgtttgaacagggctggtttgaattttccttttgtgtagacaggttaggaagcagagatttctgtaagaatgtctgcttctaggaaggtgaggaagaccatgagggatgcagacacactgttgaagtgatggtcataactattgctatgtctgggttttaggcacaaggtcttatgtcttcggcattactcgtccctccaggacagatgtatctttctcagtcggctcagacgagggtcatatgatctcaccagcatgatctcactgcatttccatcagggtctgtgggaactggagccagacttctgtgatggttcaacccctcctgttcttagccctggcctggggtgtgattaatatcccttctaatcactgggagagattgcatcagagccatcagcttcataaatcctcctctggggactggtgtttggatgcgctttccatattctcaggaggttctgggccaaatgtctttgctcttttcctggaggcccattaccataattttcttttaaatcctttattggagttggtctcctctgtgtcagtccatggctacagccagccagcccactcctgagggctggaggctgtaaccaccaacagatgctttccccaaagtattgagccacagtagatgctgaaagattgagttagtaggatactgaaagtaactgtatttgtgcaacactttacagttttcagagggagttcagattccggtatcattttaggcttcagtccttttgtatttcttgtttggttctgtgggaatggatggtcataacccttcattgactcttgagtactgtgttgggacagcttttgcagtcggaggcctggctctggtttcctttaccaagctacattttttccattgcattccaggtcttgaagaagattctgaagttacacggaaggcttggatagctgtatttcattcctgttcatatgtaaaatgtctatttggtgtcatgctaatagggaatcacagactagttaaggctctttctctgttactgtctttgagtcaaagtccacttattaggatgatatttatgtgcacatgaagaagaggtggaaagacatgcatgaaggtgtccatgccatcctctgaggctgttacatctcttggatttagacatccaaaaacatgagactgaagggagaaaaggagacaggtcttcctgtagggtctggggtgaggggtggaaatgggtaaaggaggctgaggaatgcctcccctcagactgtggactcttctatacccccccaggagtttccaggaagtgcctgagtgcccaccgactgctccccacaaaagcatattctgcattaggctgaagttgggagagtgcacagcattctatctgcctgcctgtcagagcatggccttcttagtgttcggatgtcataggctctgggaggagacagctaagtacagaggtcttcaggatgagccccctggtggtgatagagatgcatgtttgcctggggacacccaatatttactgcctgaggcctaagtccttcccaagcatgtacctacagatctgtacctgagaggtgatgatgaggaggcttttcaggctcaggcagatgaagagctcagctccaggccaggcccccagggctccggtgacagcagaaccagcatcaccacccttgccccagctttctgtgcttcaagaaggaaatgaacaaatggcaggtgtgcaggccacgtcgtgctgctcaaattagccatgttgctaaggaaacaagtcaaccattcaaaggaaggagcattgggtaaaggagataaatcaataagtgaacctatttttatcatttccctaatgattgtcttgaaactgctagactagaaagagagttggagcaacacaggtcctcattaatgggctcagagggaacgaggagtgaaggggtgtttgaggagattgccagtaaagtttatgaaatgaggcctctagtgagcagtgagctggtacaggagggaaggcaggaaggaagatgtcttttgcaagtttcaaagtggtttcatggtcatttcctcattttggccaggtcccttcattctcttgcatttaatcctctccgaagtctttttctgatttctctggccatcgcattcctcctcactctcaggttgggatgggtttttgtgttgatttgttcttttcaggatacatatagctttaattgattttgtagtgataaatgaacacatgctcatttgaacactcagaaaatggttagaggagtaaagaagaaagtgaaaataaccctgctaccgagagaagactcatcatccttccagcaagacagaattttttcttgttctctcccttctctttttttttgtttttgttttttttgagacggagtcttgctgtgttgcccaggctggaatgcagtcgcacgatctcagctcactgcaagctctgcctcccaggttcacgccattctcctgcctcagcctcctgagtagctgggactacaggtgcgtgccaccatgcctggctaacattttgtattttttttagtagagatggggtttcaccgtgttagccaggatgatcttgatctcctgacctcgtgatctgcccacctcggcttctgaaagtgctgggattacaggcgtgagccaccgcacctggccttctctttttttttttaaacatgaaagggatcttccatgtatgctggtttattttcttttttaaataggtcatgtgtgtctacagtggacagtataaaaagttcaaatgggtatacagtgtggagagtgtgggtaccttttgtaaggatacctctggctctagtttccctgtatgattcatttatcaattgaatattaatttattaataaaataacagttaccggggccccactgtgtgccaagtacagtggtgagtgaggcaggcaaggtcctgccctggggctcccagtccttactgccccatcatctccatttgttcaagatttcaaaacacaagcaatctggataccagggatagatattcttccctaaaatatgcacagtgtcaggcacagagtgtaatgagtgtcactgaattctagaacagagagtcagagtcctggacagacttccatcttgtccctgattgtggttgccatgaagggtgatggtctttgaggccgtggcgactcggagctccctttgacctttctaagtcatgtctttgtccagtctgccaggttgaggggcactagcttgactggtgggtgggtgttatttgccgtctaggctcttcactttggggatgtagcagagccattgctttggggtgtgaagttttgctgtcgggaagaaatgggagtggtgcctcggaggcagcctgcaagggtgggagtgagcaggagccatggctcaggccagagtgggtgagcaaagccctgtctttgtaatggctccttagtgaatgcctcatgttcattcttacctgcattgaacattgactaagctcctactatataccatgggctctgctaagcactgccagtagagacatgagcaaaactcctgctttcaagatatagtttcttgatttaaataggagaagaaataatacagtcacacaattcaaagagctgtggggcacggggagaaactttcactgacaaggtggcatttcagcttggtcttgatgtatgactggaaaggagaagaaacgccattgcatgtggtggcagaagcacctagatgtaaatgcctcttttttgtgctttcttcagaaagggaagtggaaaagagtttaaagaacagggctgtaagggagagtggctggggcctaggcagacttggatggtctcttctgctcacctcccctgagatttccctgccactatccattctttcacctagcccacagttacacagaatctccacattctcactgcaggttcttcattaccgcagccatgaattcatcctgaggtctagatgccctataaggctgaaagggacatccctctcaagggcatatatatctgaacaattttaaaaatgtaaagcaaaaaaaaaaatatttttaagccagaagattgctgctgtgaatgggcctcacatcagatagtgggaagaggatttggctggagaggaagtgagaatagggtcttcttagaacctgtgaattaccaaactcccacctttagattctagactttagggccttgggtagcaccagccatcaagacctcatgaattctcagccacccagatacctggccagtcactgggagtttgactcatcagcacctgggccaagagccattccgctgcctggagcatcttccggtggtgttggctacaccttcctgagctagcctgtgtccccacaaacctcacatatctgcccttggacattctggactagttgagcttaaaggtccttatagggagcaatatacttgggttaactggctaggaaaatgcaggtatgggtgtggaagcagggagctggggcagtggaggaactgccatggtccaaggggatattgtgagtggagagtcaggggcagtggaggagctgccatggtccaagtgggtattgtgagtggggaggcctcggaggcacatggctgccaggacctgtcttgcctgcaggctcagcactgagaacccatctactttgaagcctgtgcttatcactttcaggttttcaggggaagaagattcaaccccccaaaacaatcatagaccccacatagacccattagaatgcgagaggtctgcagcttgaacgagaaagtacttgtgcccagtcctaccttccagggcaggcactgggcttcttggatctgctgagcaggtgtctgaaattgcatgagacgtttccagctgtgaggagtgaccaggtgagccccacactgttgtgaacacttttgttaggaaccaggacaggggatgacatggaagaggccctggtttcactccagtcagatccatcatccctcctgccccagctcttggggactggcagacagacccccactttgtgtcaggctgcccaggtatgttcctgggaacaccgttcaaaagagatgctctgaaaaaaagagttacaaggtgaagcaagtttgggaaatgttgtgtgctgtcccaaacgccttgtgtgtgtgtgtgtgtgtgtgtgtgtgatggggtgtgtgcccactgtatgcaaaagtattaaaggccccaagaagtcctgctggggagaaacctgcttaactttgcccaacccaggctttctctcattggttgattgcaagttcctatagcaccagtatttcatggcctgcatcttaggaataccactctcaacgctctcaacttctgttgtcttttgtcagtgacttgtatgcgtgttgccagttctctttctggatccatcgcccaagcatgttttcaggaaagggtatggattccttggccaccattgctgctgggttcccatctttaatttgcaggatgagtctgggattccgggtgcctatgccaggcccagggcaacctaggctgttcagaaggcttatgggacactgggtccttgtgtggttcctggttgctctgcattttttcagaggtctgggttacagccatgatgggaggggaggagcactcctcctgcgatcagtgggcatgggtggcccttggcaggctgtatgttgggggccagtccttagaaggtggtcatgctagctgggtgggcgtctgtggtgtgtgtctgctggcatgtttggctctcaggggcttcacacccggagtgtttgaaggaagaggaatgcccatgggtgctgagggactttccatgtggggaggctcccctctgagtgggagggtttaagcaggcacagtggggtgtggaggcaatggacaggctctgaagtcccctgaggccaggtctgtttttagttccggtggctgaacctcagggcagcagaggcccgtggaatggtctctggggtctgtgtgctgtgtgagtgctagaggtgcgtgggaaggaacgatggtggtcagctgctggcgagtgagtgtgactctccagtgtgactcagagatgcatggtggtgggggaggagaaggcactgccaaatgaggattaagagaaggactaggggctcacacacagccagcatctcagccctgcagcccctgatgccagcaccaagaccagagcaactggtgagcagctcacatctcattgcacacactgccttgccctccccagagatgccctgggtgctaacttaacattgtgttattgccacaggtagcctggcaggatgggggcattgcagggatagctgtgatttgccctcctgaactccacgacagggttccaggccctgcaccctacacagcctgtctgggtatgtggggagataagaacagtccctttccttccctccactttgccagatctacggctcctctcttctgcctggattccagaatcttctggagcacaggttgctcagcaagaccagctgcagtagctaacttgtgtttgtcgtaacagtaatcacagaatgaaattccaacatgcagaatgacagcactgggagctggtgattccctctttctcttctgagagtccttcccacctccctcggagcatgtggcaaaaccttcctgcaggggtcatagtcctgtttttgaaaaggcacagggagcacctcacctgttttcaaaaacatctaacagaaaaaagcctgcattcattcattgtagtgtggttcttacaggactggactttgctgtccaggattccagactcgtgatcagtctctgtttcatatagatgcagacacttagaagaaaataaggtgggacaaagcaagcctctccttcccccagaagtacattgctgagtggaattttaaaatagaaggaagctcacatggagagaattgtttattttccagatgttcttctgttactcagtggtgcagagattctagaagagaggactccagttgtgagcccaggagagcaatggattgcagcagctggatctgtgcacaagcatcgttacccagttcagtggtttgaagactggggagaacaaggggtctgcgatggcattaattatgtttcttcctcctttcttcccccttctattttcagccttggttattggatttgttattgaattcactcagtagctggagtgtctgccatatgcccaactatattatgtattggctatatacgttccttttttggagaagatgctttgtgttcagagaccaggcacaaatgtttttggtttcacaaaaccaaaagtggatgctaaggaccatccactgtcttgcctgcctgcctgtttacaaataaaaatcatgcaaactgcacagacacaatgcgggttgatagagttgtgtgtttatgggcacggccatcttggaggctgtgtccctctctggtgaatttgttccttaactccgctttcccacgccatttgagtacatgatcctggccaccatcattgccaactgcatcgtcctggccctggagcagcatcttcctgaggatgacaagacccccatgtcccgaagactggtatgtgattcccctccttctcccctttgccccttttgtctttcttggtttcttctcctctgctttatcactctcccattcccttcctgcctgtgagttctgggaggagtttgctctttgctgggggacaagctaatgacagaccccatggggattcacacggaaaagaagagattacaaacactgtgtctgtgctgcgtggcagccagggaagaagaaagggcaggcacaggcccattttcttccctcctctttcctaagggacttctgatacgagaggaagaggtggggagtagaggggagaggatgaaggatgctcagtgcttgtgtgtatttgtggttatgaacttcccaatgcttacgtccttattctccttaaagaaatgagtcacacatctaacgtattccccctaaaaagagcagacaaactgcctaaaattcacgtgtgtacttgagatgatgaccttcaagcttctaacttatgtgaagagcagcaaactccttcagggcaaagccagggccatcagggaccttcctgggaaggaagtctagcccctgggtgtgaccctcacattgtccatttctacagctggctcccctgggtctcccttgccctgtgcactcctgagtcacagacagcctgcaagggtcccttagcacccttgcttcccacctacacatgggcaggcccagcacagacatccaggaagggccaggctgtgcttttgcctgtgtctcataaagcacagtcctcttctcactggtgcttctgctcctcatccccacaggagaagacagaaccttatttcattgggatcttttgctttgaagctgggatcaaaattgtggccctggggttcatcttccataagggctcttacctccgcaatggctggaatgtcatggacttcatcgtggtcctcagtgggtaagtccattttctctctctgtctgtgtgtgtgtatgaagggggttggtatcatgaggtggctgggggcagggaacctggggtggaaagacagcaatctgtagagtaggggcagaagaaaaagttcaaggctaagattccccagggtgctggaccataggtcagccacctcaagaggaggatgagtactgtgtggagatgcgtgtggtgttaggcagaggccatgggactctcagccaggtctggaagctgccacttctggttttccattctgtgcttggctcagtggctaaacacccacttctctggggagggtgacatttcccaatgagccttttcaccaaagcaagcagcttacccccgcctgggaggcacctccaagacgggccaaaagatgtagtcaaatgcagcttcttttgggcgttggagaagacctcagccatattttctgaactgatcattgagacttgtgttctgacaacagaagtttttatcatttgcagatttgttaatagtataaaatcgaatcatattaaaatgttggataaatcattctgtggaaattaatatagccatacgacattggggctgacccagtgtcacagcagcatatatgatggcagtacatttagttaaatatttgataaatcattcttttggaaatgaatatagtatgaggaagctgggttgacccagtgcccttggcagcaaatgtgttggccttgggaatggtgtgacgggcaggccttcctgggcttttgtggcttcctattggtctttgtgtcaggtggctcttggtacctgcaaagctgggcactgaggagtggtcctgtgtggatgtggcagcaagtgatgtggtctggaaattcccttacccaactgcttggcagacagggttcaaacccatgaagaaaagaagagagtgacttagaatggcagggaaggcgaaatattagctactactgtgattgaccaacaggaaaggagagaaaagaggaattgttttccagggaggagtcagaggaggggtgaaggtagataaagtcttagaaggaagggtaagggcttgggaatgattgcatctatttgttgtcatgtggaatagacaaaatactcttattttttaatctttacaccattgggattacatgaaagagaaaacactgaagatgtaatggactggaatatgtaaatggaagcacgtaagcagccagcccctcaatatgggaaatggataaatagactgggatgactattcatgtttaaaaatatctgttgccttacaaaaggattttctggaggttagttttctaaaagaaaattctactacattttaaatatgaattagtatatgaagatatagtttttacatagtattacagaactatattgggtaatgttgcaaatgtccctaaaataaataatatgtgctgtattagaagaggcctgtatgagaatctgaatcatttagaaatgttatgattctatctagaagaaaagtgttgtataagtcactacagaagaacaacaaaaaaagaaaagtattgtaatgtgtatataataagtttgtgtaaattcttggtcctgctcagctctatatgtggcagaatccatttgaaatttcttgtctagtccatttatttttgttttaaatgattatatgttcattaaagaaatatggaaaatacagaaaagtcaaaagaagaaaaaaaaattcactgattcagaaaaattcctgattgttttgtggtatttccttccaggccttcgatgctaagcaagctgtcttttaaatgcttgtaattttgctgctttcttcccaatatagtatgagcatattacatgttattgcatattttggtaaaaatctgtaatgactgatcagcagtttgttaagtagatgtacacatcttgcttctcatttttgcagttacttgacacttggattctttctgttttttggctctgataaataattattaaagatgctccaacgtacgtcttttggatatcacattttatgagacattttacaaggttgaagaagtacttctggaggagtatacggctgttctggtgtggggtctgggaactaatggctgagaggaggtagagaaactggtctgtttgactgcatgagagaagacttccagtagatgttaatctctctgcaaataagggttgctacatggttgttgaagaagcagattcatagggacccatagggttcttttgtcagcgaagccaagaagggcccctgggtccttgcctgcatgtccagggggtgttcaagagtcagtgcaggtgctgagcttggctgagtcagttgtcctctctgtgctctctttcccatccctcacatcttcccttcttagtggctcttcagatgtccctggctttgtgaattgccttcacaggcccctgatttccatatgaactcacaggactttgctcctgctcctcctccagacctgctgcttagccctcttctcagcatggaccgttccctttctcctcaattcatgggtgaatgtgctccaggcaaagagcttggtcctcttgagatccctgctgaggggctgagggttgcggttctatcccacaggaatgcatgatcatatttagtcttacagtcacatgatgctctcatctaccacattgtgtggctctaagatgcacgtttttcatgctggaacattgctgaaatcagcctgtgtcttacaataatggcatgatatagtttaattgacagcatgtttttctttcttagtgctacataaaattacggggcatcttacaattgttggggttgtagattcaatgacatgtgataccaaccagggaggcaggcaaagtggactttagagatgagtcatctggtactcaaagagggtaagttattcacccaagatcacacctgcctcttaatggcagatgcaggagtcagaattgtgccttttgatccagggctggtgttttgacccctgccctgtgcagcctccttaccaggccacctggtgtccccctttgtcttcctgacacctgcacccacagcagtccctgctgacagctcttccttcccacctcatctccaggtgtcacctcccattttcccctctgcacaggaggaatgacaggtgctggagcatgacacagtgcctcagggctgaggctgcacaacttctcagctctcggtgctgacaggagggaagtgggtgctgaggtgtcagtcagctggctcagtgtaagacctgctcttattgatctttgctgagagatgactagttgaggggcctgggctaccacattctgcctgtgacctctgacctcctaaactttagtgttctttggcctataagttgagggtgtgcatggtttagaaagcgcatttatgtacattgcttcatcttgtcctcataatgccatagaaaagaccttgctagcctcattttacagatgaagaaaccgaggatcagagagggcacatgaattgctagcaggcactagatccaggacttgagaccacatctcctggctccaagttccttctttcactgacttttccccatactggcagttacttcacaaccccaagggccccatggttctaaggctctgtggttgcaggttcctttagtccccgtgaggcagtgtgggatgagctcagggaggtatgatcaggcaaatgttcactctcaaaggtggggcttcacatgtgagttgaaggggacaggggcccaatgtgtccatcctgagacttctctctgtgggcttgggatgagactccctgctctgtggtaaagaaggcatgtcactttaactgtcagcatagcatggtttgatgtgtagagagtggatcagagttccagctgatttcttccttaaatggcttgtttgttcactcattcactcaccaattcattaattcagtgaaactagtattgtgttggtgaaggcagaaggcaatgctgggaccgagaaatgtggacgttattatattttcccacctgctaaaagacagtggaatttgccattcttttaacacattcttatcttacagaacttgggatctctcttgcattgggaacaactcaggcaatttttaaacacttgtcaggccacctggagaattccaaattagttgaagtcactattacacattagtcaagagtgagttataaaaatatagtacctggagcagatggacagatgagatgggaggatgagagtcaagggtactcctaaatcatgggtaacaacagggaaatgaaggcgaggactgtgtcttagatgcccactcatctctatatgcccagtgcctggcatatagttggtactcagtaaatgctgattgaattgaattgcttgcctatccccagattctcttgtctataggatacaaaaatgagtgctgggggaaggctggggctggggtaaagagggattgtctgttcccagccttcccccttggcctggctgagccaggcagtgtctatgtctctctcatctctatctacctctgccaggctgctcatattctggtcattctattaggaaaatgaaagctgggagctcaatttctaggccattaagcaatattgggcttccagtcacctgtggttatttaccaggttgtcagtgttatctcctgagaattgcttcctgggtgataagggcagagtcagcactgcatattgaagacctaacctcattgaagtggctgtggatggggtgggggttggaggggtggataaggagaaagcaggggtatcacatcacctagcgtttaccatataataaaaatggtcatttattgaaccatgtgccaaagaccacacacacacacacacacacacacacacacacacacacaatttctaatcctaaaaatgtaccaggagttgagaatcattaggcttgactattacccagtcccattttacagatgaagaagccaaggcacagacaatttaacttgtccaaatccaaatggttggtataaggtaaagtcagaatttgaacccaggccagtttgcctttagcacctgggcaccttccctaggccaagtgatgtcactgcctcagactcagcgacagcaccagctgttcctgtgctgctggagcaatttagtctcctttccctatttcccttgtgtctctttgggttcaggccaaatggagaaaagtgtgttatccctttccatctaggaagtctttgttttccattgtatgttaaagtattggtgacattacagagctagtcttgagtgttggtaatattgtctattttcctaagaaaacccccaaatcagctcaaaatatgctctttcctgagttttgtcagccttgcgtgggaggtgacctgcgttggctcttccctttactgcggagcacatggtgtagactctggggaggggcaggtgtgtctgtgcctggctcttcctccttcctctgccaaggtcatcaccccagggcctaggaggcccctcaagagctattgctgaatacccactgtgtgccaggtactgtgtttggtgtgggtggaatggggcctagtgtcttccatggtggtgggggctggagccacgcaacatgagaacgtgaaagggtgtccagcctggccctggggcactggggaaagcttcttgaaagaagtcacatttaaacaagtggaaaggatggacagatggaacttagctgggcagggaaggagaagagcccttctgggagaaagaatgctatgtacaaatgccctgtgggggtggcacatggagagaggcacacagacagaccacaggacacttctggaagcctggcaggtggcatggggagagacctgcagaggtcagcaggggccagtctaggccattctgagtagtctgtactttaaccagagggcagtggggagccacggaaggctttgagcagggggttcactatttcactgtttcactctgagtctgctctggatgtggcacaactcttttttcttttttaccctggaatcaactctgaggaaagccatggaaaaaagttggagccatctccacatccttagctgcagtttgggagaatgtgcagagccaagcagaaagaggggaggcagaggaaaagggagcaggggagaggagagccagggagtgctgcagtaaagctgggagctgccgtcctcatccccagcttctcgccagtggcacatgcagaacgatttagcctgaagcctgttggtaggaggatgctatctagagctaaatatatattgataggtatttttagagggttttctgtaaagaggctgccctaatacaagagtttcctgagcagctaaagatcgaggaaagcagagttttcctcagcactgtctctctgaggctgagaatgtgggggaagagttgtgaatgcagtcctcaggcccccagcccaatttgaatccctgtggtaatagtatgatatcagtgggtatttatatagcatcaccaggccagtgagcctggcgggacctcagagacctgtcttttacttgtccttactgttctgggcaggtgaaggatgcagatggggagcaagggcagaatgggtagagggaggagacatgagaacttgttatttaggagatggggaaaccgaggctgagtggagcaaggcaagggactcagagatacttagctgagctgctagatgaacagatatttatttagtgccttaatgctaggcactaaacctggcatcagcattattaatgctgatgttggggaggtctgcaagcctgtaagccttaccacttttcagttcttcctctcagcatcgttgctggctgctcctctgacagatctccacctcctccctggctttttgtgcatttctagctccacactggggagcacagctgccacttgcagcatctccttttatcagaacattatttctgttccaattgcatttccccccagatgggcaaatgatggaaaagataaggttagaatataggatttcgattccagggagaggtgggcaaaagacaaaatgtgaagcttaaaggtctcttcttagctctgtgctgctgataaatccagttacttcagggagactcctagtgagagtgccagttagtagttgatgggcagctgagttgggattgtgccttgggtgggagggaattttttctcatgtatgcactctgtcttttttctatattgagatgcaccattggttcactcaacagatatatattgaatatacactgtgttccagatgtaagacattggtgttgggatggtttctgtttcctgaaaggcttcttcttgccacccccacccattgacagaagctccatatggacagaactgagtggggcctgaattggctttgatatcaccaaagaggaggaaaagccagagggagtgaagaaagcttcgaaatccctgggtggtttggtttgggactttatttgtctcctggcattgcattcactcagggtgatacagggaaagaaattatggcaaggtgctttctaagtcagaccgttctcctgggcctggagctctcatttgaaggcagttaaactcgtgcattcttgtgcttgtgcatgagtgtatgtggaagagggaggtggggtgaaaatccccaggtatgttttcaaagcagaggtggatatggcataaatgcgaactctatagatttacaagaattgagaattaaaggaactgtttacatttccattctgtggttgaaatatgtctcctcctttgggtagagatttgtgcacttgtgtctatgttgtaaatgtagtccacagttaagtataaatgtgttggtgtgaaatgtgaaaatgcagcagcactatttaatgtatgtgtcactgaagtcaggaaatagcagatataatgagtgcagagtggttaccaaagggaaggggcaaggtggggcagagccgatgttgagaggaaaatgagggcatgctggtttaagaaagaacgtatgaagacaaggtaaggctaaggttactaaagctcaatcactgaattttagatctaggagaataataaatttgcctaactttcccttacttattatttttttcacagaagagaagactaaagtgcatgttgctaagtaacttgtccagggtcttttagatggggtgtggtgagctggggcttggatcctgtgtaattccaaatctaggactctgttgcagcgatgccttactacccctggcgatgagaatctgctgcttcttggttgtatttaggccatgaagctggaggtattaagaaataagattttctgttatttggctggaatatacatgtgcaacttacatggaaacagagtttaatctcatggactgaatgacctggcggctctgggttctggtcctgatcctgacatacattctctctgtcatactggtgatgatgtaacccatctcagcttggctttcctttatgaaacttcatttatgaagtgaaggtaaaacctgctgtagctacctccaccaggtttcatgacaagcaaataggatagtgatgatgttgataatgacagctcccatttaaccaggagctcatgtcttattttaaatgcagaaggcttcatattctatattggcacttgcacatattattttaaatatagaaatgtaaggcaatagtgatattatctccattttacagatgaggaaaccaaaacttaaagaggcaaagtcacttgctcaaggtcaaatagttactaaggggagagattggccctttaattctattatcaacaattctaaagcccttgctatatctagtgtacagcacagcctccactgccaaagtgttttgcaaaacaataaagcaaaataccaaatcagtgaacaataataccttccctccaggacagtgatattataaagataaatgttaaaatacacataaagcaccatgagtgccttgaaaaaaaccagcatataaaaattgaaagtactcaaaatactatggttctgtagacctcattaagaatggtcatttatctctataaaacttgcaaccacagaaacaaatttcactgaaacctattgcaaattttaaaactatggtaaatttaaaattttccattagttataattttgcctcaagagagaagtttactacatatcgcacataggatgtatcttatttcctatcagcagcatatctaattttatcaaaattagtcaaatcctgctacagtcattacccataagaacaacaaagaagttccaagagtaaaagttgaaacaaaggcctttattttaaatttttctaacaaggaaaatgttacattttctagatttccatttttttggtcttccctttctttgtcttctatcctccccacttctcacaaaacatacacaggccagaggggtcagcccctgtccgcccacatctggatgtgacccaggaaggctgacaatgccctctctcctccaggaagaatgtccaggcagagcccttgcacaaaggaggggctgaaaagaagcctgaggtctgacttcttccctcttgtctttcatttccttccttcttgactgccactcttctgtcagttgcctggaccttggtgacagaacatttaggaagggggatcagggccatggcttttctccctggcctccagcactggaacagtgactaggaggcagagtgacaagggtggctgcttcacatgtcagatgcattggaaacaatttacatcactgtgggggtccctgcatctcacctcctctccaccagccctctggggcccagctggccttggagagtccttacctagtccaggttggcatgactagccatgggagagctcaatctgaaatggaactgaaactgacctggtttggggtatctttgctgttgaatcttagtcaaaactctgggtgagggagagaaaaccagaaagaagcccactcagggctaagcatccctaatacccatatatgagctctgaactatggtgtgggggaaaatggacagagtcaggagaagacaggagggaaggaagtatagaggcagccggtattagttgagcacatcctgtgttcaaacattgtgctgactgctagggacgcagcactggatggagatatagcctctattcataccttgctgtccagcagagaagacagatatttactttaatttaatagtgtataacatgctgcataggagaagacttagggtgctaggataacttttcactgggaccctaacctaacttgagacctgaagactgagttatacttagctaggatgagacgagaagagggaaggggacaggatgaggagagttccaggcagagggtaggacagttgtgcagggctagaggtgggggaggccatggcaggtgtgagaaacaaaaagaaggctggaggggaccacagtgattgtaatctaagaggggttggaaagtaggcagggaccacatcattcacatcattcagggcctcgttggcatgtccaggcatgttcagtgggaggccattgaatggtttgaaacaggaaagtgaacagatttgcaggagaggcacgatgtttgcagagaagaagatagaacaagttgcccaaatgactccatgtctcctcagaattagggaaataggattaaagtcctcagtgtccctttcttccttcttgccccctccttccaacatcagccctcaactataattttgtttaacctattggagctgtaccaaaacccagtctacagaccttataatctagctgagcacatgttaaagatttgttaacctgcccagagtagagacatagtccctggccctctgagattatactctgagcatctcctactgattcaaataatgggtaagaattgatgagtgtgtgggcttttattttttatattcagcacagaaattattttaaaaatgctttgctgagaacattgctatatgattattatgatttttatttttctgatagaacaatggtcaaaagatcaagccaacccacatgcttgtttatgggatgtttctcttttccctgttcccaaagcccatgacacatcatgatgctgaatctggatcctaactgaactctggttaataaccactgtaaatataacattttgtgatttaggggcccttacatccttccagtggggagctcaaagtgctctgtgagttacattctacccactcatttggaagagggaaatagagaatcccagttccctttccaagtaagtgtcgtattctctgttctggagacaggtcacccagatggatccttcacatatggactctggtgatagagacgggaagggagtaaatgctcaccccggtcttttctcctgcccacttccatcccacatcccctcttcagatgagtgcagccagctctttaacgtgttagcttcttcctccctgctcttctgttgtccttttcttagtctccctaatccttccctgttttcattttacattctgttctgaaatacaagacttggggagtttgaggtagatgccacagagggtagtacgtggtgttgtggttgtggtgtgtatgagagactcattctgaccaagaccttcttagaactttgtctattagactctgacctccagtccttcttctccaataagcaaattcaagtttggggtgggatctccctactgggaatctgatcaggtcaaagtttgactagctagtactgcaaataaaggaggaggaacttccaatgatttccactccccccagctgtgactggtctgaactctaagcaacaagaagtcacctacaagcactggctgtttcctgaataaagtttccctcaaatatgtaacatagtatattttgtagtgtgtggatgctgttgtgatttataaaatataaatacatctaaaagtattgttgaatgagtagtattgttttcttttttaatttattcaatatagcatagtgattaagaatttgggcttcatagacaagcaaacctgaattcatatctttgctctactgttttctagtactgtggttgtgggcaagtgacccagcttctgttaagtctcaatgtctccatctgcatagaaaaaggaatggctctgggtaataacaattatttaaccatgttgttaaggggctatagtaattgaaataactcctccaagggatggggttggtcttgaatttgtgacattaaaaagagagcctcacacttgaaagaatgagaattgctagttcagtgtaactaacccattgatatgaaagaaggagatgaggcccagaactgcaatgtatgccccattttgcctgtggctaaagcctgattttagtcaagctggtcttcagtcttgtgtagaggtgatggggaaagtagaagtagaagttagatacaatgcttcactcgtgaacagaacagtctaattggagttcacgagatatatggcccgtgtttgatttttggtatttggtagtggaggtctgggagttgggagcaagcagctgtcatccttttgggaagccatgctgtccccagcaggtgacaccccaagtctctttgccagtgaggccccaccaccccacactagtatgagttaggttgctcatgcagagccatttctcaggcattattcctaactcttttccttttcataaagtgagagggcttatgctcatccctcaaccagactatgaaagagacactcacattcccaagtggtggttttatttttttatattttatgtttgtatgggaaattgtggataaagtgaaataattataaataaatggtatgtttccttttttaaaaaagagcaatctaattggaatagaatgtatgtgtggtcctaaggcagctgggaacaatgtgacccgtacagagcttgttccaggttggctggtccaggctataggagtctcatttttaaaatctaaaatacctctcttgcaagatttatgtactagattaagcagggctagatgctctaacaaataaccccccaaatttcaatgggttaacatagtaggttctctcttgctccttgaacaggccagtgtgtcctgaacagtgctcctggcttccctccacttggtgaggtagagacccaggctccttctatctggtagctctgctgtcctctatgatctcgtggtttatgtcccttcaagagaagtggaaagagagagtaagaataaggcatactccttaaatgtattggtatagaactgatacacattacttctagtcacatcccattgacaaggaacagccatgtggctcagcctagttgcaggtgagactgggagatctaatccctaattgggcagctgccttctagcaacaaccttgccctgtgggaaggagagcatcaattttggaggacagtaatgatctcttcattatctatgtgagtataaattgtcagatgcataggagatatataataaatgttttcttctaattattagtaacatccattgagtcaagaaatatttgctatgtgtgtacaaaacattttgctaagtattgaggctagaaagataaataataagatacctgcccccaaggaactttaagtctgatgtgtagatagtatatataggtagatgattttcatttgagcttgacaacatttgatcagaagaaaaaactgggaataaatgtgctctactctgtgcaatcagctttctatctgtccatctatcctcctttcattgaatgggtcccatgtgtaaggcctagcggtgagcagtaggagggacagcagtagagttaaatagggaagagatggaagatcactgggaatgtggtttcactttgccctaatgcagcagctgttgacacactacatgctggtgtaactagccattgaactgttgttgccacctctcttgatcaagctttgaagataagcatgagaaacaattagtgtatttcatattttttttatttttgttgtcatgcttatttttgtcctcttcaagatagcaaagcctaggggtagtcagccagctgaggctatttataaaatgtccatgttggcctggatatcactactggttaacatttgtcaaactctaaactctgtagtctagtaaaacagaggatcaggagccagtttcagagggaaaaccaacctttccatttactaatttcttttctatccttagcctgcacaaagaaggttgagaagtcagaattttagttatgaactgtgtgcaactacaacaaatagagtcagtagtaaataaatggttgtcacgagtctttggagaaggatttattattgtggccatagattggagtggtccttgaggatgttaattatgttgctgcttgttgcagtttatgacatggcttctatgtggggtaattggatctaggggagctatccttttccatggaaaaaggccagtttggtctcaggtttatagccctaaggaaaggagtttcagaaagcagttgcccaaatttttcagcctccttgatatttccagtgcacaattctggaaaagggctccttaattcagaaattggcctttgttgcagggatgctaggtcaggaggcagggaggggaagaatggaaaggagagcagagattacctagttattcaggactgtggacctaattaatagctggtgttcagtgctaatcactgcattaaacatttcaaaggatttttaaaaaattcttggcaacatccctgtgaggtaggtactattataatcactactagatgaggaaaccagggcttaggtggttcagtaattcccccatatcatgctgctaatagttagttggtggggtcaggattccaatgaggaagcctgactccagagcttaggtttctgaccgtgatgctacactgccttcctaatttatgtatctagtggctgcatggtctgaattttttttttttttttactcctgatgcatcttaattaacaaaagtgaaagggtgtatctgttggtctggatgtcaaaatccatccaagggaatataaaactcactacttggttttagttactggaaaaatggcttctattgaagggaattaagagaacaatagattattggtttttctatatcattttgatcttgaaatcaatttagaaatattgtccatttagcctgttaacaataggttagagttataacacaggacagcctggcaagatgcaaggaacaaaggctctggcatgacatagttctgtatttgaagtctgcttctggctttgtgacactgagcaagttatttaacctctcatcctcaatttccttactgggaaatgaaggatttagggtatttctgagtattttatgagactaaactggtatgatatatgttgagcatttgaaacagtgctctgcacatagtagattttcaacaatagtacctgctactattttatagtttattgatgaggaaagggaagcatataatgaacaaatatattctctgggttactctagcccccacaaaaaacttgccctagctgggatgaagttgttgtccttgtattttcaatctgttgctacttgtgctggattatgctagcttctagaacatactaaatcttgagttaatttcttagtccatttggacagctatatcaaaagtatcatagaccaggtggcttataaacaacagaaatttatttctcaacattctggagactgggaagtccatgatcaaagcagattcagtgcctggcaaaggcccctttcctggctgctggacagctgtctgtgtcctcacatggtagaaggggtgagggagctctctggtgtctcttttgtaaggacactaatcccatataagagcagagtcctcatgacctaataccttctaaaggctgaacctccaaatatcacattggggattaggtttcaacatatggattttggggatacacaaacattcagtctattacagtgggctttagagtcctggaatcacttcatctttgatctgtatttatagcttaatttatcttgatacaggtttcaaaatataattgaatagctacactcacttgataatattaaagtagggctatatctttaaggcacagtatcagctggctgtgaacaaaatgctggctgatatatatggtcttctttttctctctgtattcttttttgaattctcattccagttctggttttaaatgtaccttcagtaaatagatcctctttatttcccttctagttcattacttacttcccatgccttcctacttatataatcaaaatctcatgatagttctatgttgtttttgttgctttccaattacttatctgagtcttcctcttttgagagaatataacaccttaatatttattgtaataaatggtttgtttttattcttttcctttattttatttgctatttattagactttattactgtttcttcatttttcttcttacttctttctgtattgatcagcatcttttaaaccagttttttataattatctactggattatcaaactcttgtggtgaagaccattttttatctgtttcattttactccccatctttccacttctgatatggtttggttgtgtccctacccaaatctcaacttgttgtatctcccacaattcccacatgttgtgggaggggcccggggtggggggggcagtaattgaatcatgggggctggactttcccatgctattctcatgatagtgaataagtctcatgagatctgctgggtttatcaggggtttccacttttgcttcttcctcatttttctcttcctgctgccatgtaagaagtatgtttcacctcctgccattattctgaggcctccccagccaagtggaactggaagtctcattaaacctctttttgttcccagtttcaggtatgtttttatcagcagcatgaaaacaaactaatgcagtaaattggtaccaggagaggggtgttgctgaaaagatacctgaaaatgtggaagtgactttggaactggataacaggcagaggttggaacagtttggagggctcagaagaagaaaggaaaatgtgagaaagtttggaatctcttagagacttgttgaatggctttgacaaaaatgctgatagtgataggaacaataaggtccaggctgtggttgtctcaggtggagatgaggaacttgttgggaactggagcagaggtggctcttgttatgtttttgcaaagagactggtggcctattgcccctgccctagagatttgtggaactttgaacttgagagagatgatttagggtgtctggtggaggaaatttcttagcagcaaagcattcaaaaggtgagttgggtgctgttaaaagcattctattttaaaagggaaacagagcataaaagttcagaaaattggcaacctgacaatgcagtagagaagaaaaacccattttttgaggagaaattcatgctggctgcagaaatttgcataagtagcaaggagcctaatgttaatccccaagacgatggggaaaatatctccaggccatgtcagagaccttcatggcagcccctcccatcacaggcccagaggcccaggaggaaaaagtggttttgtgggctgggcccagggtccctgtgctgtatgcagtttagggacttggtgccctgtgtcccagctgttccagctgtggctgaaaggagccaatgtacagctcaggctgtggcttcagagggtggaagccccaagtcttggcagcttccacatggtgttgagtctgaggtgcacagaagtcaagaattgaggtttgggaacctccacctagatttcagaagttgtatggaaatgcctggattcccaggcagaagtttgctgcaggggcagggccctcatggagaacctctgctagggcagtgtggaagggaaatgtggggttggagcccccacatggagtccctacgggggcactgcctagtggaattttgagaagagggccactgtcctccagaccccagaatggtagatccattggcagcttgcactgtgcacctggaaaagccgcagacactcaacaccagcccatgaaagcagccaggaggaaggctgtacttcacaaagccacaggggtggggctgcccaagaccatgggaacctacctttggcattggcatgtcctggatgtgagatctggagtcaaaggagatcattttggagctttaaaatttgactgccccactggatttcggatttgcatgggccctgcaacacctttgttttggccaatttttcccatttggaatggctgtattcccccaatacctgtacctccattgtatctgggaagtaactagcttgattttgattttacaggctcataggtggaagggacttgccttgcctcagataagactttggactgtggacttttgggttaatgctgaaatgaactaagactttgggggactgttgggaaggcatcattagttttgaaatgtgaggacatgagatttggaggggccaggggtggaatgatatggtttggctgtgtccccacccaaatctcaacttcagttgtatctcccataattcccacatgttgtgggagggacccagggggaggtaactgaatcacgagggctagtctttgctgtggtattctcatgatagtgaataaatctcacaagatctgatgggtttatcggggtttccacttttgcttcttccttatttttctcttgccgccgccatgttaagaagtgcctttcacctcccatcatgattctgaggcctccccagccatgtggaactgtaagtctaattaaacctctttttgtttccagtttcaggtatgtctttatcagcagcatgaaaatgaactaatataacttttttgcaggcttataagcatccatatacatacagcactaaatttgatgctgagaatatagcagatttttaatacttatgtgtagctgacagtttgactgtgaaactcagttgattccagtgaaaaatggtgtgttgtagtggaaagcccacctagacccaaattagtagaatcctggtagtggtccttattggtggtatgactgcagcactagttgttttatcttcttgaatcttaatttaaaatgagatagcaatactagcttacagaaccatcgaagagactaaatggaatggcatatgtgaaaatgtctggtaactttattgttgctggtacctttacctgtctaccttcctcccatcccttctgctggccagtagcatgagtcatgaggggcaccatatgcagttatctatattcaggctatgggtgctgcagagaagagagcccattaaaatttgatggtgttcccaggagctgctgggctggagaggtaaaatggaagagaagagaaagaataagaaataagaatagtcagaaattttgcagcttttgaagaaggaaggcacaggcttatggtttatgatctgcttgtatgcatgcctgcctatgggttgtatttattcctgcctgagattacatcaaagtacatctacatctatatttcatattcatcctctataccatatattctcctaaggagaactcttgaatgtgaactgtgtggcagtggtgtttcctttgcagcttgcttgctttatgaatgattttgttgaaagaatttaaaagccttttccttcctttggagaaaccataacttatttggataaattgctccagaatgggattcccctgtcttttctgtttgtatcttttctgccttttaccaatccatgccatgatgttctgttgtgtgggaaccagtctaagacctggcttcctagggggatagcccccttcctctgtgcccacttagcacttatctgcattttccctccatcagcaggcatttgtgtcccctctgtgttattctcgtggccctcttgtttcttcactgagattgagggcgggggtcatgttctcctttccctgttctctagggtgacttgtgtatatattcttagacccacaatagatgcccaacaaatgcaagatgagtgagaggtgaaaagcagggttctgtgcaaacctgtccatggagctgggcagggcgggaggtatggaaatcatgagcccagcttacgccttatcgtccatgttcactcatactttgcccagggtgtgtttactgctcctgagcccaggtagcaggtgtaaaaatctaagctataaccaaaccttaggcccaggagcagtaagagtgtgggttctaagctcatagtccagctgtgggactgaggctgaaggtagaaaaattgccaggcatggtggctcacgcctgcaatcccagcactttgggaggccaaggcgggtccatcacctgaggtcaggagtttgagaccagcctggccaacatggtgaaaccccgtctctaccaaaaatacaaaaaattaccccggtgtgatggcacgtacctgtaatcccagctactcaggaggctgaggcagtagaatcacttgaacctgtgagacagaggttgcagtgagccgccattgcaccgttgcactccagcctgggcaacagagtgaaacttcatctcaaaaaaaagaaaagaaaagaaaagaaaactgggtgacatggagtggggtcctttgatcaggactctgaggaggctggtgtgtttctcccttcctgtttcagaggcagcccacatcatttagccaattaagttggaggactctattttctgtttgagtgtttgttgttttttgtttaaaataaatgatgtgttaatacagtcagttgtttgcatgacacagatttcttttcaatcagtctcttttcccctctccccactcttcctggacaattagcaaagtgtttggtctttggtttggatgaataattgattcagaagctttgtgaatgattcatggcccatatgctggggcagcatgatgtggtgtatgggtgtgtggcagcagcacctcattacaaaggtcaagcttctcccaagcttggtgcaggggctgtgcaggccacctccaggggcagagcacgttgcacctgatctttctctcatgttctctcaaagagagagtgttggagcttcttccagaaaagcaaggttctctatgggtgtatgacttccagaccagtgattctggtttgggttggatttgtcagtgaactgaagctttcccctttaagccaacacttcactctccccaagctgaatagctgatttgattttcaaagcatttgaggaaaggagatctcttgcctgtcttcctttacattacagtacttcaaaccttcccaagcaggggatacttttttctttggatcttctcctaaacactccctgctactacgctaattttatttccttgtctatctcctttactggagatggagaacacctggttaccattcgctttataggtctcccttgtctttgaagactattattacatacttgcttgcatgaggcaatgggactgttgcctagcttgtggaagagtggcattccctatctacaaaacctctcagtatttgagacttcttaatgtgtcctggtctttagaagctgagttaggaaaaataagttggttacattaagtcctgaaccaagttttttgtctcttaggcagtcagatcccacatttttaaatagggaatcgagacagagacaggatatgaataaaatccaagactctgatgaagatgtggcagtttggtgattgatcatttggggtttttttagtaagatcataaaaatattgcataaaaatttattttctagcataagttatgattatcatgtttaggtccctaatccatatggtgtttctttgcatctagtatgtgaggtatgactatacctatatgtttttccgtcacttcccaactccactgagtgaatactaacagtacaacttttgcccactgatttgtaatgtcacttctgtttgtataccaaattcccatatatatgtggtctgtttttaggctgtcttttctatcccattggcaatgattaatgactatatttttataaaactttttgataactgatagtgccaatcttcccctccatttgtctttaaaactggctaatcttagccattataatttcatatgaattagaactaacttgtcaaaatcttcaggttttgtttggaaatgcagtggatttattgactacttttggggaaaattaacattttcacaatgttgaatcttaccaatatttctccacttatttgggatatattttataccctattatagttttggagattttttccacttatgacttgcgcatctttgttataatttttcttctgtatcttgtaattttattactcttgtgaatgatttaatttttttatttctaatagaatgttgctaatgtataggaatgttagtttttattcgttgatgttatatccagcaatcgtgtaaaagtttgttagttaaaatcatgttggtagatttttttttagattatataggtagaaaactgtattaactacaaacaagtgttattgtatttgtttctttctaattcacctagtatatgtttctttttcttatcttattgccctaaacaggacttccaggaaaatgttgggtaatgacagtaatagaaggctgtcttattttgttccttatttaaagtttaacaatgaagacagatgttccttataatgttatggtgaatactctttataaaggaagtaaagaatgattgttaaactaatgtcaataatagctcaatattttcatctaattcataaactcaaaggttttggaagttcattctgtagaagattaaacattgacattattgtgggtgctattgaaaactgagttaaaagtttagtactagcaataagcttatttttggagtgataatatacatacaattttgatgaaacatgatgttattgtataaacaaagtttttactaaattaagaaacctatggaacagaaacatataggatgaattgtatggacaaagaattcattatcacagccacacaaagtatggtattccgcattttgaaataaagactatgtattgggtacagtatacactgcttgggtgacggctacactaaaatctcagaaatccccactaaagaatttatccatgtaaccaaaactacctgtacccccaaaactattgaaataaaaataaaaaataagaaaagaagtagtaggcaaatagaatgagtaaaaaagaaaaagtaacaagaaaatttagcaagttcatcaaaaagcaagaaagcagagaaaggaagcgattttaaagtgaggcaagcagaatgtgtgaaagtagaagtaagtcctgacttaatagcaattgaaacaaatgtaacagattaaacttattttttaaaagtcagaggccctgtgactttatttaattttttgatcttatgtttaaatgactaagctaagtaaaatgacactagaaaattgaaaatagaggaggtggcaaaaggtgttctagacaaatgccaaccaaaagtaagtgaacataacattaaaaaaattcaaggtgaaaatatcaaaggaaacaatagtgactatttcactgtgataaaaagaaaataattgaaggacatttaaaacttatgcaccgtcagaataaatgtctgttaaaaacgtaaaggtaactattaggtaaggagatttccaactggttttgaacaaaatgcaacaaaaatttaggggtcttcataaaaaagttcagtatcattttgggcacttaggttgatttacaaagcaggtcctcagaggcttaaacatttataaaatgtttcccctcccccatttgtctttaaaattggctaatcttaggcattagaggtcctgaactaagttttgaacaaggtaatgggcagcaaagagaaaaaatgtatgctgcaattctgactttataaaaattcaccaccaacatcatcacaaaacttttgtagttcagttactctgtgtatttgaaatttttgataaaactataatgtgtgtatataaatatatttttatgtatatatgtataaatgtaaattacatttctgccatatatacacacacatacatacatatgtaatacacccatacccatgcacatatagatgattacctttaaatttttaaccactctattgttgtcttttatcctttgtggctgatagtgcttccaatatcaacatgattatttctttttttttttttttcgagacagattctctctctgttgcccaggctggagtgcaacagtgcaatctcagttcactgcaacctctgcctcccgggttccagcgattttcctgcctcagcctcccaagtagctgggattacaggcatgcactatcaccccggctaatttttgtatttttagtagagatggggtttcaccatgttggccaggctggtcttaaactcctgacctcaggtggtccaccgaccttggcctcccaaagtgctgggattacaggcatgagccaccatgcctggccaacatgattatttctttacagataacttttgtttcctctttcattggaagcattagcattttttccttacttttggtgctgtaaaatttcactaatatgtgtcttatatgatggtttctatttatttttatttttatggcattttaagatttctatttttattcaatgctgggaagtacttttgaattgattcttttactttcaaattctctgcttctccacttcttaattttgcttctctccattttatctattctttatttgtagcacttgttttaaatgatgttggaatttcttccctctatttttaatcttttctttatatttttcatctttttcttactcttgtgttgatttctgggaacactgctcagttcagtttttcacatctcaaattcacctgtctattttgccactcaatctacttaatcattttaaaagttttcagttatcgaaatgttcaattgcaccatctctaggtaattttgtaaaatgcttgcaatattctcacacttttctctaagctgataattatatgtcttcattctcattgagtataagttctttgattgttgagtttgttctctctctctccgtggtattgaaattcctcaagtttttggtgattcttgattgtaatattatcttctttctaccatgtctgtttgtgcaaacttcttggaaggagaatacctatgaagctaatagtctggcaagggtatagaagtggtgagacctgctgctggatgggtcactttgatgaccagtcccctgggagagagcacttcctgttcctctcaggcatggaaaggcatgagagcacttccccatctttctcacccaactttcatgcccattgcccctgcttgtgggcagattttcctttttgctgcctggtctgagggataaggtgggttaaggaggagggttaaagtgagtgcttgatcttcctgctactgtattcaaaccatcaccctgttggtcacctggatcccatcagatcccagtggccaccctctgtaggtgggagcacttgtggtgacatgcctacatttagagtggtcatattctcttctgagggctgggggccgtggtttctttttcttttctttttttttttttttttttttgagatggagttttgctcttgttgcccaggctggagtgcagtggcacgatctcggctcactgcaccctccacctccaagattcaagtgattctcctgcctcagcttcccaagtaactgggattacaggcatgaaccaccacacctggctaattttgtgtttttagtagagacagggtttcaccttgttggccaggctggtcttgaactcctaacctcaggcgatccacccaccttggcctcccaaagtgctgggattacaggtgtgagccaccacacctggcctgtggtttctttttaaaaatcagattgtagctactttctgtccagaggggattcatcacaacatctagcctagtgagggtttgtttctcttttttctgtccagtgtggttactgtatgtatatagaaaatgatttctaggaatttggtggaaggggggagaggtcacagtgtgtgttcagtctacctgtctgagagagaagttgaggcaatattttcttctaacctctctgagtctcagttacttcacattcaaaatgaggtggtgatgatgatgaagcatgagggtggtagtggtgattctcagttaatatttgaaattggagtgtatgtcaggcactgttctaagtactttacctgtgcaaacacatctaatgcctcaacaaccctatgatgtctattctattactattgccattttatagatgaagaaacagaggtacagtgagattaaataatttacccagataaggggctacctactatgtaggattagtttgagaattattaagctaacacatgtaaagcacttagcatagtacctgaaatatattggaacaacaaaaatggcactaataaatatatactgagtgaatgaaaagtcaccaaatatttatattccatgcagtttgcagaagatcttgtagaagttagttggacagggtgccctgttctagtgttttctgtcttagtgtttttatgtaatataaaagctgtgtgtttctggccatttgattcttaccctaccagctcaatatttaaaatttttacatattgagttattggtgcttgaaaccattttaaatctttctgctttctcatatgatatgattgcaaataaattaggtaatgagttttaaaaaatcagttgtggttaatctttcaggttcagagaactgaaaaatatatctgctttaagggaacttacattctaatttccatacacatatatattacatgcatttttatacatgctgcatgagaaagatgtcctttatatggtggttctgtattgaataccagcatccagcacattgtctggcacagagcaggtgttcaataaagtactgctgattcaatggaatctttttcatgtgttatacgtaaatgtgcatgtatatgtaaattggaatgcaaatctgtgccttcctgggacccatagtctagtggaagagagtgacaagaagcaattgcaatacatcaccgcactaatgctctgttgaatgtattctgggagtatggaagaaggagaaggtgactgtgtttgggaaaaaaaaatcacagagaggtgatatttatttaagctggatgttgaaggtgggtaggagattgccaaggagaacatgggaaagggcattcagtcagggaaagtggaggaaagcaaactgactagcaaagtcctgagaatctacaaagtgaaaatctgttcagtgatatagtgttaatctgaaaaggcttctgttgaattttgaaaaagatcatgcagaagatgataagcatggtttcacaaaatgtaatataattctgcaattctttgcctaaaggctttcagtggtttgctgttttctgcagcagaatacaagatccctcctgacctgaccacatgcagcctgccctccagctatactggactacttgtggttccttgaattgtgtgctatttcatgcctccttccttttgaatgtgctcttttgcatgctgtaacaccaaccctgccatccctctggctggtatctattcagctaagtgactattccctgactgtgcttcctccccatttccttctattttccgttactcgttgactaggctcaccctaaacttcactcacccagttgacattagtatctcctccactacatagcttctcaccaagggcttgaaggcaggggttgtattgtattctatttgaactccttgtgtgcctggcacttagtagtcattcagcaaatattaccaaatgaacagataatgactgaacaagctaattaatgaattaatgaatgaatgaatggcagatatgaaagggggaagaattcaggaagacaggcaaaatatttcaaggatacctttaaggccaaatgaagaaatggaaggttgatccagccaatccttgtcacatgatcaccttcatgggaggaagaatatattattcccggtctgcttaccccttctctaatggtccttttaccactactaatgctctgtatgagcctctcaatccaggtgtcccgcaaggtctgagtcccactgaagcttttcttaagttgagtaaaagtaacctgaaaaaactgataagcatttttcttagtagaaatccttcctctgagcagtaacctctgaatattatgtataaaaccattacattacttaatggataagactcatgttaaaattcaccttgtctccacagaagatagacccagagtttagtctttgcttttagtggccacatgtaaaagtggtgtacagtggagctgtattacttattataggtcttgtgttaaaataggacaaaggtaaaattagaaaccaggatgccagatttcaggtccccagtcttacaacaaataaacatgcttcctatttaggtcctctttggtctctctcctccttatcatcaccatcagcagatgctcaatgaacacctcctatttgggtgtgacatcctgttgtgtgcttgtgatgcacagttagacccttcagattgtttataataagggagatggagaaccttcacaaaatcccccgatgtaaacgcatttcctagatcccttgtggaatttattgtaattctatacatgcacacaataaacatcagagggcttcgagtaggtgcctcatcatcaggaatgccctgtatcctcatctcccaaaccgtggcacagggctgattcccctgtgtttactaccctaatctctgtgctctatggcaacatggtgttttatatggcttttatatggtagtgtgtactccttgtgtgcctggcacttagtagttattcagcaatatttgataaatattgaacaaattaacaaatgaatgacacatatgaaagtgagagaattaggaaggcagatgatggggtttagaatatgctccccaaaatatgtcaccttggcgtactcaatgttttaagctaaaggaatttgaaaaacaacgtgtgcaggaaagactctctggtcttcccctgaaagagctcatagaacgctcatgtgagaggtgccctcccatccctggaggaaaggagcatcgtgatccctgaagacagagggacactgacagggatatgaacaaatggacctcgcaaagtctcccctagtttactgtacttagcccacaccattttgtcttattgtatttttccataattttccactcttcatcaaacctggtattaaaacagtcaggtataatcatttcttggagtcctcatttccttataaaggctcctgtgtcttataaaagttatacaggttaagcatccctaatccaaaaatccaaaatcaggaaatgctccaaaatctgtaacttcttgtaacgtggtattcaaatgctcattggagcatttcagattttggagttttggattagagatgctcaactggtgagtataacatgaatattcccaaatcaaagaaatccaaaacacctctgctcccatgcattttggataaaggatatttaacctgaattaaataaatctgtatgtttttcttttgttaatttgtcttttgttatagaaccacagctgagaacctggaagggtaaaaggaaaaggttttttcctccactacgcgggcaaaatattgcaaggatgttcttaaggtcctaaaaaatcttaagatttaacaggtttttaggcagaaatgttgtactttccatttagaaagaagttgaagctttatatccaacattatatatgtttaacataataacagttaaagatacacttaaaaaaagatggagagaattttcaaggaataggatttcaggagctagaggtactaggagttatgaatctccccattagataggtagacaatgaaaaaaaaaagggggaaggggatgatttgcagtttgatggtaacaggatcgttgagagcagcaaaacagaagtaaattgatgctcatctcccagattagttgagaacggcctaattagctaatgaacagttccagtcctatgttctgaaaggctctgtttctgggcaagccgcagtgcttagcagcagctgctaaaccatgtggacatgctaacaccaagcagaggagcacatgttatgttttgacctgcaaagactcgtctttttgagtcacacattcttcaaggagtattagagatcttgtttcttcgtataatagagaagtagcagtctcagtggcatgaactctggagccagactgcctgggttcaaatctcagctttgtcacttactaacacagtgatcactgctgcttggtctctatgtcctcatgtaggcccttgctccccaccattgtatcaggtttggtctgggtgaccaagagaacacggcagaagtgagggtgtggcttttgaggctaggtcctagcagacattgccatatcttccttgctctcttggatcacttgcttggtggggaagcaggttaccatatcatgaggacactcaaggagccctatggaaagtcacatgatcaggaactggagactcctgccaaagccatgagtaagccgtcctggaaacccagattagtcaagtgttcagataactgcaaaccccagctgacagcttgactccaactgtggttggtttcttgactgcaacctcatgagagatcttgagcaaaagatccccacaaaaacactctcagattccccacattgctaattactgttttaagccacgaagcttgcttttcagaagtgttaatagataattaaagcaaaaaactttgtaaagaactagtttaaaggatgttcttaacaacagacttgacttgatgaagaaatagtggctgatattgtttggctttgtgtctccacccaaatctcatcttgaattgtaatctccacagtccccacatgtcaagggggagatcaggtggaggtaattgaatcatgggggtggtttaccccatgctgttctcatgatagtgagtgagttctcacgagatctgatggttttataaggggctcttccccattggctcagcacttctccttcctgctgccttgtgaagaaagtgtcttacttcccctttgccatgattctaagtttcctgaggcctccccagccacgctgaactgtgagtcagttaaaactctttcccttataaattacccagtcccgagcagttctttatagcagtatgaaatcggactaatacagtggcatgccttttaatttcttgatttatggaatacctttaaagtaatgttacctaaagtaacttttgtggaacagtagtcctgcaagatgctccatatataaggggtttgatgtgtttattagtttgggaaatgctgcatactagatctccttcttggaaatacacgttgctcataagcatattaaagaatataaacaagtcttaaggattttttgtttgtttgcgtagtccattgtttcctaaactcatataaccaaggaatttttaaagtcaaatgtcacatattaaaatattagagaatactctgtaagaaatgttgtcttataacactgattctcagacttatgcctacatcagaatcgtctggaaagcttaaaacgagattgttgggccccactccctgtgtttctaattcagataacctggggtagggcttgaaaatttgcatttctaataagatccctgctgatgctgatgctgctgatgggtgcgtgtgtcgggaggggaccacactttgggaaccactgttcactagggtttcaggttcctgagtaagagcttaaagaatgaacatgcaaatggccaataagcacaggaactgatgttcatctgctatggactgaatgttcctgtccacaaattcatatgttgaaaccccagtccccaatgtaatgatatttggaggtagggtttgggggagctaattagttcataagggtacagcctttatgatgggaatagtgctttcagaacagccgtaagagagcttgcttcatctctctctgtcatgtgagaacacagtaagaagatggttctctgcagactgagaagagggtcctcgccaggaatctaactggccagcaccttgatcttggacatcccagcctccaaaactttgagaaataaatttctgttgttgaggccacccagtgtatggtattttttaaagcagctggaactgagcaaggcaacatcattagccattagggaaatgcaaataaaaaccacgataagataccacctcacacccattagggtggttacaataaaagagacagacaataacaaatattgagcaggaatatggagaaatttggatcctcacacattgctgttgagaatgtgaaatggcacagcctcttttaagctccttaaaatgttaaacatggaccatatgacccagctatttcacctctagaaattttaagaggcataacatatacccatacaaaaagttgtgcattaatgtccatagcagcatcattcacaatagacaaaaagtatcccaagtgtacatcagctgatgaatgggtagacaaaatgtggcatgtcagacaatggaatactactcgacaatgaaaagcaacaaagtactgatacttgctataatgtgggtggacctggaaaacataaagaagttcctcacaacaggctacatattttatgactccatttatattaaaaagttcagaatgagcaaatccataaagggcgtacgatagttgttacgaaaggctggtagaagtgaggtggggagttgactggtaatgggtttggagtttttttggagcgttgaaaatgtcctaaaattagatagtggtgatggttgcacaatcctgaatatactaaaaaaaaaaaccccactgaattgtacgctttagaagggtaaattatgtggttgtaaattataactcaataaagctgctataaaaatgcatatagcttctaaattaggatggcaacaaaagtacaaatatccaattgcagtatacgttttaactttattgtaacctataaggtgccagaggcatactacaaatggtggcagtggtgggttggtgcaagctgaaaatttagatgtagctggcgttttagcacccttctccccctccttcattcccgtgcagataataaatgtttattgttgttctattgtggccccaagtgagctgtggacatggtggggaagcagcaggctgaccccggagggtttgctaatcagagagagtgtaaaacctgtttcagaatctgtcatttacatggggcagcaaatgacagatagcaatttaaagggtcacctttcccagggtatggctgtttgttttggtcattgtggttggttgttttgcattttaagaatgtttggagccttaagctagcacagtggctctccaaacttcagcgtgcatcaaaatcttctgaggttcttgtttaaaatgaaaaatttggccctacccccagagggtaaggaatctgcctgtttagcaagcactcagatcattctgatgcaggtggctcatggaccacggtaaaaacatttcagctccaaaaaaaaaagtcttgctatgttgggggtgtacataaataagcatggggctgatctaaccaaccccaggacagtagttactcccagaaggaggggatgaaaacaggttgggtggagccttgcctgtgtctgaaatgtctaggttttttaaaacatgatttgaaagaaataacagaaaatattaacccctgttacatataataccatgtttgttgtatcttttgccttattttttgactatttgaaatgcagtatctcaaagtattttgtcatacttggcattttagatgttcgtccattccagggactcagtgcactgaggcagggaagacagtggtccagttggtgggctccctgtgtcctgcagggctgtggggggatggcagtgctcccagcttggaatccccccacactgaggtgggagatttcctcctcccacgtgagggtgtggtcttgactactcctggctccacacaggctgtcccttagggcagggggcaggagctcaagaagctggaggacagaatttctcccctgagaacaggaaagagaggaggcacgaggaaaccacagtctgtctgctttaccctgatggacttctgttcagggagtttgggtgaattccacatttggatcacaatagttgtcgcctgcctttcttttccctcatagctttcaagacccctttcatgtccctctgtctccaggaaagatgatttatttttttcttggcccaaggctcccccaggggccccaagtccaaacactttctttgctgttccttcaggagtgttctttctgtgatcccattatattgaaatatatgcagatggagcatcacgtgtgcctctagggggttggggaggagcctaaggaacctagagagccatcctgagatgtggggagagggttggggtgctgcaggagagcgggatgactggcctgtgttgacagacacgccgtggggaagcagaagctgccccgacagtcttgtaaatggagtgttcacctctagcagatgtaaggcatggtttggaaggggatgtgtgccaggtcgtcaagtttcacagcagtctcaggccagttgggaagcctggcagcgtgtgccatccctgagcaagagggaggctggaagagaggactgtggtctgaaagttaggagccctgggctcttgctagcttcttccttcttcgaacctctgccctgctgtgtgagagcaggtagtgcccttcctctgccttatggagtgatgagaaggaattagggcacttggaagatgctgatttctaatcctttagttgccaccaggcctcagcccccttgactttcttcctcaccccctcaattttcctgctgcccttgagctcttcataaaagtccctgctggggccctgccttctgttttctatctcaaattgtcccctttcccttcccagacctgttgtcctctatgttgaaagtttctaaagttatgtgagggactgtttggggctagggtggaagggggctcttagtagacaccaccactcacccattctgtgccaagcttggggccagctgctgcggtgataaacacaccctcttctctacacaaaaaagccgtgcagacagtgcacattcatcagctcctgttctgcctcttcatgacaactgtccacctctcaggacatgatgtgctctgaatatcagtgtcgggccatttcaaacccaggggatttggtgtctggtgttagcctggggtaagaagtagtgacccaggcactgggctcacccctttcctgcattctttatgcctgacagtttctcaagtcgtgcctgtccttttaaatcaagcgatctgttcttccctttgatgtcgtcctcctggccaccagcctacatcctcattacctgataacttagatgatttaaagcctcactggttggcttcttgccgtcattttctccccagcttcagtctgttaacggccatgaaaatctcactaaagcccttctacagcaaggcacatgcctaaatgggaacccaaaacatctccctctttcccattgccccctctgccctgttctctgtggcttttgaagccttcctcagcactgatgccacctgaactccagcagtgctcatgcctgcccccgactctggccaccgatgccaccttaactccagcagtgctgatgcttgcccctgactctggccaccgatgccaccctaactccagtggtgctcatgcctgtcgctttggatttctcacccctgttcatgatctgccctcctctggaatcctctatcctctcctctttcctgtgcatctttcaaagcctttcacgatgacacgggctggtgcatttgcattcagatcctctgttcactagaaatggaagggaccttggaggtccttgagtccagcttctttccagagtccccgcaaggggcagtaacttgccactgactacacactaggttattccaggaccagacctctcactcctagtccagcgctccttccaccacaccatgctgcccaaagatgtagaggaagcattctcgcccacagctgactgggatgttgtcatcaacagcggcggagatgcagtgggagtaaataacaatgtttgtggaggccttcttattcattgcatttgcgatgcaattagcactttattatagcttgttctcattcttattgtcagttccacacattgagccctttattttatcagaatataacactgcctcgtttgctaattacctcatacatagaagtaaaaactgtcttaaatatcttttgtagcccacagcatctcctgaagttctaggcatagaggagaacttactatctacttgttaattcactgggtttcaaggacaattccaggcaaggctcacatttgagccattagttgtgatgaagacctgtccactaacagcattgtcagctttgccttaattttctatctgaggcttcttagagcctcctggttagaggtaggtatactttcccctctgttcccataacactttttttttcttttttttctttttttttttttgagtcagggtctcattctgtcacccaggctggagtgcagtggtgcgatctcagctcaccgcaacctctgcctcccgggctcaagcgattctcctgcctcaacctcttgagtagctgggattacaggtgcgtgccactaccacccagctaatttttgtgtttttagtagatacggggtttcaccaggttggctaggctagtcttgaactcctgacctcaaatgatccacctgcgttggcctcccaaagtgctgggattacagatgtgagccaccgtgcccagcctccataacactttattagtatctttattgttgctcatgtcatatggataattatgaacagactcctgcctcctcctgtgtttctggggacaataagaagtctttctttgtatggcccgtaggctgctttgtccacacaatgtcttgcacatggttgtgctcatacatggttgttgaattgaatattatgaataatgacagagttaacagtagcttaccctcatgtggtttatctacacagcccagggctttcttccacagtgtggccaaaccccagactgggactaaggccaggctaggagggtttgggatggtttccagatgggcaaagatagttttgtgtctcagaatgtgtctctaaccacatctcaaaaccaaatatgataaatgactttcgtcttatccatcatgtttagttggctaagcctcttcctctatcagcccagataatgaagagatgggatttttattgttttctctgtggcacagagaataaagcaagttcccaggtaacaaggcacagcagcatctttcaagccccgaaactgagatggtctgagaagagcaggcacgtctaggagaaacagaaaggaaaagccagccggaaaggggaatcattcttaatcgatcccaagcctctgagagctggaaggtctgactgcattttacaaataaaaaagtcaaagccccataaaggaaagtagcctaaagccacagggatggtgaaggagtggcgtcaggatgggcagaaagagctctggactcttgggctgctgctacaaccacctggtgtgggttttcttaacaccacagctccatcaggttcttaggaaaaatgtcacacaaccaggttgtcaaaagggctttgagggcattaagaaagggacagaagtggatggattagaatggacaggtagggtaccaaggggccagagtgagaatgaggaagaagggctgaagagagagggatcagtcgtatttgcttctgtttctgaatagtttccctttttggaaagagaagtaagagaatagaaggctaaaatcatgccacagactggcaggggtggttgggtgtagacacaacagctcaccttcaggctgctttcacattcattcatctctttcccttataatgatgatgctgcctccagtttttagaactttctggaaacttctgagaagtgactgtctaaagggggatgatgggagaaggggagttgtccatgggttcccatcgtgcttgctggagcaatgggtgttggcagatttcttcagaaggagtttgtcagcagtggggtggggctgggaagaaagccacagtgaggcaacaggtgcaggcatggagaccagagcaagcacagtgtccgtggagaacggcatgcatgtcacggcaaccactggagtgagcgtggagtggagcatggcggagagtgggggtgaacaggcaggcaggagctctaggtctgtgtactgcggtgacacttctggattctactgtgaagacaatagagggccattaagaggcttaaagtgagggggtggtagaatcctggctacatagacctcccagcactcagagccttggaatcttgccatggtggtacatgtgtgtgttgggggtaattagggaggaaggggtgaggctgagctaggatgactagttaggacaccatctttactgtctagaatatactgagggctgtgacctgggctgtgtcagtgggaccagaggaggggacagatacaaaaaatacttaggggtctttaaacttgggggatgagagggaagaatccaagatgaatcccaagtgtaggggagggtggcttttttcaccctggatgaggagcagtctggtatggagaggggatgagggtggctctggctttggcggttgggtgtgtcttttggactgggtgtggtgccctatagaaaggctggagcttgggacaggtctgtgtggacacctcgattcatcactgcatggttggtagttgaaaccatagacatgggtcagattgtcccagtgaaatggcagagaagagggcaaggacagactccaagaggccctgaatcaaatgggtatggaaaatatggagggcctgggatggaggctgagagggagctggcaggaggggtgggggcagattggttgagaccattagcagggaaatgagggagaaagagtttccagaagggaatggttaccaggttcaaatgtgagggaggaattcactgctggcatttgtttgagaagccctgacctttttctgttcccttgctagaaataaatgctttttttttttggtagcagacagtaatgtactggaatggaatcatgattgttccgtgtctcagaatccatatgtaaagtcccttgtcagatagcagggaaacagtcatctttgggcagtttgtactgagagggaggggaggccgagtgtaaaggatcggtgccttaattttagcaaggctctgagccccttggaaggcaagctttatttctacatagattgaaagtattattattattacatccttacgctgtatcagcgccaaacactggagtcctcaatactgtatttatttctctgggcttttggaggggtggggaagaaacgggacatttaggttgctaagtgattgtgcttgcttctaaaaataatgagattccccagtggctcgttctcctgtgttttgcttagagttagaggatgccaaggtcaagttatagatgacaggctgtgtctccaggtggtgtcagggcatcctgttggggaaggacaaggtaaactctccctctctggtcctcccacctgcatccccttagggcccactactttgggaaattgcaggaaaaactgggcctccccctgcttggattgaagagcctcgcctaggcagtcagcctcagtggttgccatggtgatggtgggtggttggtggggtggtgatgcagcgtttggcctgtgcagctgaggtcctcaatgcaggctgcttggagcccaggctgctgaagcttttgacagtttgtttaggattccagagggtcacttgctgcggtgttgaaatcttcagacagacccgccagctcagccagctgaaaccttcattgttgaatatgcatctcacaggccaaattttggcaggcgctcatgggattaggagctccacagcaaccttggtgggggaaggggtgtgcgaaaaagctctgtgcaggggagagtggctgggataatagactctgaggacaacagaaggccagaggcccttcagatcgtccagttcatcaacaccttcaacaacatccctgacagctggtcaccaagcttctgcttggactctccttgtgatggggagctcactaccgggcaaggcacaccactccattgttgaataggttttacattttctcctctctccctcacttctttcgttcctccctcattctctccatctttccttcccccctcctttccttgcatcctttcatttttttggcaaaattctggccccttctaatttgattcactgactcaagttatgccaagaaggaaagcagtgtaagctttcatcaaagtgacaaccacttgccacccaacaaaacattcatacttttctcagctacttctgacattatttcaagaccccttgttatttccccatcccctatatttctccatattgctcttaaaatataacacccagaatgaaccacagtactcgactggtctgaccaatgcagaggactttagggtgacacccatgtttgtgaacagtctgagatgattttgtagccccctcctcacacccttggctgatacgaaggctgtgattctctgtcgttcccagatcttttacatatgagcagctgatgctgggctctacatttgtacttttttgattttgtcatctaagctgttgagaaacacgttgaaatggacagaaatgatgatggaatgccgtggcaaaactctagaggcctccctgcaggtggaaattataatagtattcatagctttttttttctgtttttatatccaactatctacttgtctaaccaattaatcactgatctttttttttttccttagagtgttccattccattgtatggatgtgctacagtttgtttatttattcagcaatggaaggacatttgatgttttccagtttggggtgattatgaataaagctgctctaaacattttttaaaatcattatatatttattattttactttaagttctgggatacatgtgcagaacgtgcaggtttgttacataggtatacgtgtgccatggtggcttgctgcacctattgacccatcctctaaattccctcccctcgcccccaccccctaacaggcccctttgcagggacatggatattttggtgttatttctgaggtctctgttctgttccattggtctgtatatctgtttcgatacccagtaccatggtgtttcggttactgtagccttgtagtatagtttgaaatcaggtagcatgatgcctccagctttgttctttttgcttaggattgtcttggctatacagggtcttctttaattccatatgaaatttaaagtagtttttttctaattctgtgaagaatgtcaatggtatagcattgggaatagcattgaatctagaaattactttgggcagtatggccatttttacgatattgattcttcctatccatgaagatggaatgttttttccatttgttcgtgtactttcttatttccttgagcagtggtttgtagttctccttgaagaggtccttcacatcccttgttagctgtattcctaggtatcttattctttttgtagcgattgtgaattgggagttcattcatgattcggctctctgcttgtctattattggtgtataggaatgcttgtgatttttgcacattgattttgtattctgagactttactgaagttgcttatcagtttaaggagtttttgggctgcgatgatggggttttctaaatatacaattatgtcatctgcaaacagagacaacttggcttcctctcttcctatgtgaataccctttatttctttctcttgcctgattgccctggccagaacttccaatactatgttgaataggagtagtgagagagagcatccttgtctcgtgccagttttcaaagggaatgcttccagtttttgcccattcagtgtgatattggctatgggtttgacataaatagctcttattattttgagatgcgttccatcaatacctagtttattgagagtttttagcatgaagggatgtagaatttatcaaaggccttttctgcatctattgagataatcatgtggtttttgtcattggttctgtttttgtgatggattatgtttattcatttgcgtatgttgaaccagcctggcatcccagggataaagccgacttgatcgtggtggataagttttttgatatagtcactggtattttgaggtgattgctatcattatcatgatcttactaataagaaagcagagccacagagaggtaaaataagttgctcaaggtcacacaggctctaaatagcaaagtcagtatttgaatttagtgttttttgttgagctagggtttcactctgtcatgcaggctggagtgcagtggtgagatcacagcccactgcagccttgacctcctggactccagggatccaccccagcctccctagtagctgggaatacaggcacattccactatgcccagctaatttttttagttttatttcttgtatagatgaggttttgccatgttgcccaggctggtctcgaactcctgagctcaagtgatcctctcacctccgcttcccaaagtgcttgggattaaagatgtgagccactgcgcccagcctgaatttagttgttattcagtaatccatataatttgggaatgattgttcaaatggcacagactctcacaggggttcaatctaccattgtgtcagtgtagcagatgagatttttgtcaaggggcttgctgaaatccagggtaccatatctttagcattttcctagtctgtttgtccaataaccctgtttaaaaaaagaaacaagattagcttggatcggtttattccaagaaatctcatgctaattcctaataataagaaacaatgccaatagtgatactaatggtcctcacatttgctgagtcccagcctgtgccaggcactgagctaagcttgtcccatgcactgtttgatcatcctgctttctcgttgctcacacactgtgtactgacgtacggctgaattctcctgggattgacaatgagcttactggttatcactgtagagtcttctgtttggaatcaagacatttgctcaggttttaaggcctctgtttttatccccagtttctcacaagctgcttgtttggatgtcttatcagtgctggatctaagtgagcatttaatttggagctgcaggctgggttcaagtctggctctatgacagctttttatcaatgagaccaacagcaaatcactcaaccttgagctttggtcttctcctcttccaaatggagattataatccctatgcagagtatttccacagatgctgagatgctcatacaggagaatgtttgtgtaaaagtgcttctcagacttcagttgcagacacacttgagccatttttgttatttaaaatggttaagtgttcctactagtattatctcctatccaagtttcacttttaacagaatttatcctcccccttttagatttttaaaaaatattcataagacactcagaggtatgactgaatgttggtcactagacccagaaaggggtatacctaccagctcttgcccactgagttgtgcttgaggtggaagaaacagaattgcagactccaggaggaaaaggtatgcttctagaggtctttcatctagagcgaatctttcccaccttctcctaatcagcagaaatcattacaggaacaagacatatcgatcctggtcagagggcaccatatacatagagttctgttttcttctttttctttccaccctcccccagcctcagaaggctaatccagtgccacctgcgatttcttctgatgttactgtggaagggagggttacataaagagaataaccaggttttctcctgtggcacctgcagccccattttctcattgggaaaaccaaggtatgaaggaataggttaggacttaatggtgcataaactcagagccagcagtcattcttccatccctggtcttggcatttggaagatgagatccactatgttgtaagctctaaggggcaggaaatacaagatgatgtatttatgtaaatataatgtactatgttgtaatcatatgtgcatgcaggaatgaatgactgaataagtgaagggagaattcttttctacctgaactgtggctcctgctagtctgaaaggcatgcagcctttcttaagctttatgaagaggaaggctagaaagaagttcagaaaagcttcccccatctttattctttaaactctatataaaggcatgaaatgttctgagactgacgaaaacatgggcctagaccagcaaatgattttggaataacaaagatgagcctagttctctagctattgtcacctcctttgttgtgccagtggtggttaccatgtgtcctccttcactggaggatacagccaaagtgaaggatgctgcagtgtaaggatgcaggatgggttttctggcttcaaattcgttatagactagagtagcccagggcatcttcttactagatgtcttgcatcatggcagcaacacccctggtccctctggggtggatggggtgcagcacaccttggtgaggggtttacactaaatactgctgaccccaggacagcaatttctcatacatttttattccaaagtattcctgaaaggtacttttgcttcctcatgtttccacaacaaccccctctagagcaaggatataaataagaaagcaaaatttcaggctccctttacaatcacagtagctgttaactgctgaaagggactcagagaggggcccctatgggagggggaggcagagggtggagcaggccagcctgtctccctgggtagcacatccccaaagaatcctctgagcattgatctttgattgtgccccttccgtgctacccagcaggaccttctcccctaaagaagggtcactttgtattgaggatctccttcttatattgcatttgcttagagggtgcatggcctcagaccacattttggggctgatgggaagaagttggggcaggagggcactgtggtcataatgaggtcatggactgctaaagcttccagttctgaggggctcaggtttctcaacagagtgaagatcaaagtgtgttcagtgtggctgctgctgctgctacaaagaggtgtgaaatgtgggtttggaaagagaaccgaggataatttgctagtttatagcctttcctagagttcacacagaatttttagtactttctctccctcccttttttgtaactgtttcagagaaggtgtgagatcagcaggctgtgaacatcgtgcagtgtgggaaaggggagctgaggcatgggtctctgtctccttggccctgggagaagggattttggtgggagctgggggagtgtttgggtgtcatcttggggagcatgttggggagtgtgtgggatcaacattcccaccaccttcctccctgtcacctgggtgctggcttctggaaggctcagccctgcaggtccatagcaggactttcctggctgtgccgtacaaagtacctgacgatgagattgcttggaagggcatggggaggagccagtgacagatgtggtgggatccatagaaagggctgctgtggagcctctgcgtattactcaggagcacctactgagttttctgtacagcctttgttttgccctctggaaaatgccaccaggagctctaaccttactgtgatcaccctttgccattcagtgcctgcctccattccatctgacagctttagatatttgaacagtcctcttgctgacagctgtgtggagcaggagtgtcctgttcgcatgccaagtactcagactctgggaagacagagataatgaacttccttttcaccccagtgattgcctccgagttcagaactctgtgccctcgcatcaggctgtggctgagcctccaacttgctttgctcccttggcccagcatctctccccttcctgtctactttctcaaccactgctgggagaccttcctaaagcatagctttgctcatgttatccgctgggcagaaaccatccatgggtctcagtgctcatgagaggagggggcagagctggctcagcggcactctgtggggaaaggactcgggttatgttaagaaagtgagattgctgccaaaagggatcccaccctctgggcctgctgtgactgggattccaggccttgaataagattcagacagtcccatttttaaattcagctctggctagactgcctctgcagtgtttttgaaatgggtgctaccttagaagagcaaaaaggagtagtctcagatacaattgtccagaataactagggtttaatctaaagagtgagttaccaggaaatgagagaaggagtgaggacataggcctggagaagcgaataattccagaagcaagtgacatttgtcttggaacacttgaagggcagtcttgaagctacactaagagagggttactttgtgtagctccaagttcagggatgggctgtgctgccctcactgcaagagttcatatagatgctgggatgagcttcgcccaggaacactgtgttcctggagtttgggcttgattttctaagatcatatccaacttgaagtttatcagttcaccctttcctgccacatacatttatcgagtacctactacatgccaagcaccttagtttgtgttatactggaaaggcagcacaggctttgccctcagagaactcagtctagtagggaaaaacagataagaaaactgaattataagatagaagactgagggaaagggtggtttgggaaaccttcctgaagcaagtgcatgctgaacagtgttgaggaggagcagtttaaacctagccagggtgaggtgcatgcgagagccctgaaatgtgaaagctgggcacctgcaggaaaccaaaattagttcaggtgactggagggtggcaggcggaggcgtggcaagaggctggaagacaaggtggaagacagatcatgacattattctaaagtcagcatggaaggattggaggattttaaatgagaagctataagccagacttggattttagaaagatcactctagtaatggtctggagagaagaatacgggaggaaggggtagggaggcagagagaaaccagtaggtattcttgtgaaaaattatgaggacgttggcagtagggatagagaaatgaaactgttaatagagaaaaagctatggagttcctacaagacggtcttttgggaaagacagaagaggtgacatttaagttgagacctggaagatgagaataaaacagtcacgtgtagatgtgagaccaagagagctccaaattgaaggactagcgaagcccttgaaacagaattaagcctggagcattcaagaaacagagaaggctgttgtgcccagatcacagagatcagtggagacagcctgaatcttgcagggcctgggagaggtttgttcctgggaaaggtttgggctgttactgcaagtgtaatgagaagctagggagctataagcaaattggtctgacttacaccctagaaatttcactccactgtgtaaagaatggattacacagaatatgtgcaggctggaggccttgtagggagctgttggagagtggaaatgcccagcagggtaccaggtatgcaaggagagaggtctgtcctggagataaagactgggagtcatttgcatccaagtgatagttgggcacttcgtttcagtaaggccttttagggagtgagtgtggattgaaaataaaagtggggaaaggcaagtatgaaactttaggaaatgtggcttttaaagggaagtggaggaagaggagtagccaaaggagaaaaggataactcagaaggaaagggaggaatttcaaggagagggtactaaacactacagagttattataaagtgctgcaatacaataccgacaagtacatcttgaatttggagacctgcgggcctctgatgccctgtaatgagtcattttcacggagtgaggaggacagcagccaggggcagcaggctgggtaggtagagggtacaaatgtgcaccagcttcagaagctggaccagggaagtgaggaggctaaggaggggccacagagatgcagggaagagctgtgtcagaagagagcacacaaaaagttgaggaaacaggagagggggtcatcacagagctgctgaaggcgtgggatgcagagcatcgacattcttctgcaatgtgagaaaaagggtcaccagcttttaggagacttcagtccacattggtattagaaagttttgattgtttaaaataaggatctctaatgattatggaagagctattttttttttctgtatttgttgacctttagtcatgtttgaagtttagcaatcagaacatgtactacagctcttaatttgaatgtaaactcaccatccaggcccacctagacagggtcacaaagagttgcttttgtgaagagctctcaatatttttgccaacttcagaaggttaggaagatactgcaaacaaccttgcttttttttttaagtttttttttttgtgtgtgattataaggaatatatttccattggaaaaaaaaatcaagaaaatacagataagcataaagataatacagataacttgtaattccactacctaaagacaatcactgttaccattttggtatatttccttctagtcttttttttccttttgaatgtattttacactgttgaattaatattttagataaaatattttccctttaaagttatactgcttttcctcttaagactatatgatgccttttccattgtattaaaagttctgtagaaataacatttaatagcatttaaaaggctgtgtaatattccattgagtgcaccatactttgctcaaccattcccctactgttaaaacactaaagactttctgtggaaaaccagtatggcagttcctcaaaaaattaaacataatatgattaaccatataaaccaaattgaaccataaaaattaaaccatatgattcagcaattccacttctgggtatgtacccaaaggaattgaaagcagggacttgaacagatttgtacacccatgttcacagcagcattattcacaataaccaaaaggtttcagaagcaacccaagtgttcactgatggaggaatggataaacaaaatgtggtctgaacatacaatggaacagtattcagccttagaaacgaaggtaggcctgacacatgctacagcatggatgaaccttggaaacatgatgccaagtgaaataagccaggcacaaaaggacaaatactatgtgattccactcatattaggtacttagagtggtcagattcacaggcagaaagcagaagatggttgccagggggctagcaggaggggagagttattgtttaatggtacagagtttcagttagggcagatgaaaaagttctggagatgagtggtagtgatggttgtacaacaataggaatgtacttaatgccgcagaactctacactaaaaatggtttaaaatggcaaatttcatgttatgtatagtttaccacaattaaaaatcttaatactgacatttttttgaagttgggtttattggggtataatttgcatttagcaaaatccattcttcttagatatacaactctgtgttttgacaaatgtatatagttggctaactactaccataatcaagatatagaatatttctatcaccccccaaattccttccagcctctttctagttaatcttttctcttcatcctcagcctctagtaactgctgattttttgttcttatagttttgccttttctagaatgtcataaatgggatgaggagtctacagcctttttggcttcttgcactttgcataatgcttttgagattcatccatgttgctgcatatatctgtagttcatttctctttatttctgcctagtattcagttgtatggatgatcacaatttgtttattcaccaatcgagggacatttcagttgttttcagtttggggcaattatgaatgtagctgtgataaataactattcattgctgggtcaaatggtaagtatatgtataactctgtaaggagctgccaaactgttttccaaaatgggtgtattattttgcattcccgtcagcaatatatgagagttacagttgctccacgttctaagcagcatttaatattatcaggctttttattgttttggtttggtttgtttttagccttctaataagtgtgtagtaataactattgtggttttaatttgcatttctctaatgattaataatgtcccatcttttcatgtgcttatttattctccttatctctcattgctgaagtgacctgttcacttcttttggccattttttaattaggttgcttgttttattatttagttgtagatgatttttaaattttttgctattatagataatgcttcagtgaacaacattgtatgtgaaaatattgccctcactttgggtctatacttataataatttcctaaagctactaaatcaaagagagtgaacatcttcaccatccttatatgcccatagtccaacagctcttcaaaaccattgcaccaattcactgtcctactggtggcagtttaataggcatgacaggccattgtgttgtcttaattggaatttgtttgattataatgctatggaactttttttcatatgattattaaacagtctgtgtttcttcttttgtgagtcatcatcccttgccttttttgatactggattgacatagaaatttgccatggctgtatctctacaggattagttctacagtatgtgatgctccatgccaggatcagcagtttacagtattttcataaaatcttaacttggtcttagcctcgtttctttcactttcggaggtcacgagttaatttgcgtagctggcaaggtaaaaataagagttgaagagaaagatttttgccctcaagttaaacttggacactgggtgtcagcacttctgtgagaggcagacatctctctgttgttcctaataaatagaaaaagtgttcttttaaattcctctctgagaaaatggccatgccacttagtttccctgttgtgagagtaacctcttgattcctctaacaactcagcattttatgtgttcacaatgaaagtacaattaaaatcacttacttcatgcttgcatagctctatcaaatagattcaggcagcaaacagttcctgtatataggcacaattcttttttaattattaaaattgcttatcttttattttattccaaatagatggtatgggatgtgatatgactcagaagtactagaatgaattttgacttaataactctaaaaataaaaagcattttgttttctctgacaaatagctctcgttcattttgatgctcgacagacagctgatattttataaaactttatgattgcctcttcatcaagcactgtaattgtaggtttgtcttctttgcaagtatggggaactgggtattttcttttaaatacttgtcatcctaggaggcggattgcctatgcctgtcatgcaaatcaacttttcaggcatcataggcagaactaggaaagtagaacaatggaaaaatatatatttttgtctaaaatttatggatctgtgacttgcctgaaagagttatttgagaaggtttttataaactcaaacagatcctttaaactagatatttcccagactgcccaaaaaagggccgctgtcccccaataccacacaacactatgagaaagtagaattttattgcttgggtttttcttttcctcatactttgaaagatctctttggccagctttccattcagtgttaacccacactcgtcagtgtttgatgtcatgagaagaggactctggcttgctcaaggatcatgagtgagtaaatttttcagtcttccagaaggggaaaaggaagcatcattttggtatcttagggattaagacacttgctaacatgatatcaagaaaaaagcttgcacactctccaattggtatactggctccatgccagttacatagttttgggtttttccttgtttttcatgtacaaggatacctcagagaatggttgtttggctccagaccactgcagtgaaacaaatatctcaagaaagtcacataaattctttggttttccagtgcatataagagttatgtttacactatagtgtaacttatacatatagtgtagtctattaagtgtgcagtagcattatgtgaaaaacaatgtacatctcttaaaaatactttattgctaagaaatgctcatgattatctaagcattcagtgagttgtaatctttttgctcctggtagatcttacctggatgttaatagctgctgactgattagggtgctggttgctaaagggtggagtggctgtggaaatttcttaaaataagacaagaacaaactttgctgtatccgttgactcttcctttcatgaaatatttttctgttgcttgtgatactggtttatagcatttgtctcacagtagaatttctttcaaaattggagtcaattctctcaaactctgctgctgctttatcaactaatttcatgtaatattataaatcctttgttgtcattttaacaatgttcacagcatcttcatcaggagtagattttacctcaagaaactactttctttgcttattcataagaagcagttcttactgtgaaagttttatgagattgcagcaattcagtcacatcttcaggatccatttctgattctagttctcttgctattcttaccacatcttcagttacttcctccactgaagttttcaactcctcaaagtcatacataagagttggaatcaacttcttccaaattcttgtttatgttggtcttttgacctcttcctatgaatcatgaatgttcttaatggcatgtagaatggtgagtcctttccagaaggttccaattgactgtgaccagatccatcagaggaatcatgatctatggcagctgtagtcttctgagatgttatttcttaaatagtatgacttgaaagtcgaaattacttcttgatccatggactgcagagtggatgttgtgttagcaggtatgaaaaccacattaatctttgtttccatcagtgctcttggtacactgtcaatgagctgtaatattttgaaaggaatctttttttttttttctgagcaggtctcaacagtgggcttaaaatattcaggaaaccatgctgtaaagagatgtgctgtcacataggctttgctgttccatttatagagcacaggcagagtagatttagcataatttttaagggccctaggatttttggaatggtcagtgagcattggtgtcaccttaagtcactaactgcatttacccataacaagagagtcagcctgtcttttgaggctcttataagtctggccacaccagttttaccatctttcactttggtttcttatctagatggtattatctatatggaataggcaagtgggttattgtgagtgacagaaacctaacttggactagtttgagcaaggaggtacttttcagggaaatgatgtttcacaaaactgccacactgcaggcagaattagaaaataggccttgggaattgcagaaatagggctccaggtccaccagaattatttcctcttttcattccctcttggccctgtaagattggctttatttttctctctcactgtagccagttttcttctggaagagaaaacatggatagtgacagctcttgagccttttagcttatggcttcagctgcttcagaagagatcaaccaaactctattggtcctaactccaaacatccagggaaggaacttcctgcccctgatcctgttaactgtggccagtagtgccatgtaagagcactgaaatttttggaaagaccttagggatgaagtattgttgtcagaggaagaggagggactggtagtaaaaacaataggtgtacattctttgtgggcagtgctggattatatagctaatcatggggcttggatactggagttcattagtgcatcttgtaacaaggccacttttgggggtgtggctcccacatggataattagctggatcctggtcttcagctgtgtcctgctctatccctgactagccatctcacaactgcttgttcctggtcctgggggggtacctgcggagagaaagtgtgtgggtggtagatcaacagaaatccctcgccactgctagaaaaacaactcaaagaacatgtatttatgtagatgatttcttataatgtgggatttccctctccagcaattttcctttgccaactctctgaagcacagttttggtaacattcatatgatgctgcaatcataggataccataaagctctgcagagaggcaactctggttgtcctagagaatgcatttgtcaaatatatgtgcctttgggatatattactagctattagccattatctttcgtagcttttgaaagcactccaaatttggaatctaaatttctgggtttgagtctcagcttgatcacgtattatctcagtgacctggagctagctagtttctctctctgaaccttaattctcaaacttataaaattgggatagtggtacctgtatggaacagggctatataaactgtgaaacaacaataagaaatgtttctttttctttttgttatcacctgggcctgaatgacagagtttttctccatctcttggcatttctcctagctgtgtctgagtgaataatcagggactttctcagaaaagagaaggaaatgcaggaccattggtaggaacttgacctttgtttctatcatactgaggttaagcaaactctttatttctgtattcttcgtctggcatcctttggggaacctcttcttgaggttaaggtgagatgaaggcttcctttggagacacgttcaggccaagcttcatgctctgaggagttgtttcaggaagaaagagagaggagctatgtgtatgttctcccagtgtgaatagggactaatgtgaaacatatgccattgcctttaatcaggctattaagcatttctcagttttgatggaacctctatctgagaggttcacctatagcagtggttctcaactaggggtgatttttgcttcccagaggacatttgacaatgtctggagatgttgttggttgtcattgctgggtgaggtgggagggggttggcaggaggggttgccacaggtatctagtggttagaggccagagatgctgctaaatacactactaccatgcataaggcagctccccaccaccaattgtctgtccccaaacatcaatacaacatcttcttcttagtgtggtggttttgattgttgagctttcttttggtggagaaggagaaaggatttttaggccatgatttttattctcatcaaaaggcatatattgagaccacttcatacccgctaggatttttctgaaatttaattatgaatgccattttaaattccagaaggggttgccttacttttgttaaatacagtactctttattccctcctagaaatggcacagatctctcttggagagggcaaggtgactctactccccttctcatcctcttaagaaatatcatggcttcttatctgttatatattgtctgtggtcttagaagaaagtctgtgctccagtttggccataaattaactcagagccatatgtattgagcaatataccccaccaagctgtaaaacaaatgaacaaatggaaaacaacaaaagaaactccaaaccaaccaaccaatcagaaacaggtcactgccccatgacagttttgaagtgtgtgtgaaagaggagaaagagctttaagactgtccattctggagggcagcaagatgttgttgcttcaggtagcataagagggaacagattctcttctacaatgccatgtttgtggttcttggaaaagcacagcaaaacctttcaaggcaaactgtttcatcattctgggataacaccaagaagctgcatggtgctattaaagcagccattcatgttggtctgccttgtcttctgtagaggtgggttttttaaactgtggatcagctcctttggagggtcatgaaatgcatttagttgattaaaaccttaagtaaggaagaattgaagagaaaacatgagtacatcacacaaataaagagtactgttttatgaaacattatgtaattttatgtatgtgtgtatatatatatacacacatatatatacacacacacacatctggcttgtgatgtaaaatacattgcttaatgtaggctatgatcaaaaaggcttgaaaatcaccactttatatgcttttacctttgttctagaacataggtcaattgaagcccaaagtgtattttctgttctaactcaggggcctgagtttcattacctgcttacctgctcattcctaaaccagtcactacccaggacagtggatgatttgcttatacgaatctacattcacccacaggggagtctggagagctgcctggcctccccagcatgcatgttgtcagggaaggctgctgcagagaaggcagccagcacagccgccccaggaatggcctgtggggatagagaaagtagcattagtttaggtacagagaccaaggtaaacacccagttatggcaactggggctggggcttggggagaaggtaaaagaccaatagttaatcaggaaaattcttttgagcttagagtagcagtgtggttaacctggtgttccattgccaaatttaagcctggagttctttgaacactgccaggcttggtccaaaacattaatacagcctataaaattttccttctgtgacatttcccagtctctccagatctgttcattcattcattcattcatttatttttgagacagagtctttctctgctgcccagactggagtgcagtggcatgatcgtgattcactgcagcctctatctcctggggttgtgattctcccacctcagcctcccaagtagcagggactacagacacatgccaccatgcccagcttatttttatttattttcatagagattcgtagagataggttcttgtcatgttgtccacgctggccttgaagtcctgggcccaagcaattcctccaacttggcctccattaagtgctgggattacaggcgtgagccactgtgcctggccctcttcggactccttactgtctactctcccctgattcattaggtttcagccacaccagccttgtttcagtttttcagatatgctggtttcttttgtgcctcaagactttctgtgcaggcctttttctgcatctgggatgttcttcccacattgtttcctctgacctactccagcttcactttttagctcatctgccacttccacagtgaagcttccttccctgacctttcgcttatcataattgagacctatttaatgtatgtctctttcattaagtatcgcaaggacagccatgatcaccatcttctctactgtaatgccagggcctgctgcatggcatatggtcagaagtatctcgattgtagagtaagtcttgggctctgggatggagctaagcctgatggcatcaaggggccccggcagagtaggtggggaggaagaggcagcttgcagccatctgggctgggcttgacatcttttacacctttcccagcctcgtcctcttccctcagatatatttccttggtcaagttgattttctttggcttatctctatgtgaacagtttaatacacagggactttttaaaaaataaaatgaagtaaagtctccagaaattgattcccaaatcaaatcacacttcagtaatttaaaagaaatagagagcaaaacatcatgtgtaattcagtagatttttgatagatcataattacttacacatgtggctacaccccctttaatttggatatccaattattaggtgtcatgggcccagtcacagctccgtggatgcgtctgtggatgagtccaactaatctgcaattggaaatgtattaacacccacttctccttgagcgaagggcatttctagagcattactgttgcatattgttccagaaggagccatagtgtgtggaaatgggaaagatggtttctgccatcagggagctggttttgaactgagttacgaggatctaactcattaatgatcagacccatgttctaagatataagaactgtatgtaattgggagttaaacatagagcagctctctggatgttgagaggaagggagattggtgtgagctacagaagcatagcaccatcagggcaggtgttggctcacagagttagagccaggaggggtctgagaggtccgtttatctgatcatttcattttatagataaggaaactgatatattatttctcttcttcctctgtaacacctaattattttctatgagccaaactgtagtagactttttttttttttaaagttcttcctcattcagcttccccagtggcaccagttttcccttttgggaagatcttattgtgtgttcctcggggggagtcttgctcaccttggaagtggtaggggatttgggtgcagggggacttaaccttgaccacacgcttcttctgactttactcttaagctgatgatgcaacaacagcaagacagttgatgtttataatcataccaatagccacagtggcctaagaatcagatttcccagaatctctgacctttgccaagtgtattagtttcctatagcttctgtaacaaatgaccacaaatttggtggcttaaagcaacacgtgtattttcttacagttctggaagtcagaagtctaaaatcactttcactaggctaaaatccagggttgtgcttcccatctctcctccccagaggctttagttcgtttctttgcctctcccagcttctagagctacattcttgtgttctttggcccttgggcccttcctctatcttcagagtcagatgcagaataacttgcttctgtccttacattgccttctctctctctagtcaatcttctgcctttttcttgtaagggcacctgtgattgtgcctcgagtccacctggataatccaggttattctttccaccaccagatccttaatcccatctgcaaagtcccttttgccataacaggtaacgttcacagatttctcaattaggacctggatatccctgccccaacaaggtttctgctttcctcttttcccagcctggtcttccaatatcccctcaattctgtgagttcctggtatcttctcagtatacctttttggagggagggagctgatgggtctgcagtttaagacagttgaaatctgtttctgttgtttatgaccaggaacctccatggtaaatcagtgctatgtgcagaactttacaagcattatttttttttaatccttgttttaactttcttaggaaggcactatctcctttttccaggtaagaaaactgtagctcagagtggcaatttcaaaaagcctgacagctagtataggtgatggaactgggatttgaaactagccagtgtgactgaagagcgtgtgccttatccctttctcagaatcctagttcaactagcttttggtcttagaccttttccaaggaggaagtagaatgtcatctgggccctgaggtctgaatcaaattgtttaggcaggggagagaaggcaaaggagaagcattccaggtaggagagaggctggagactaagaagtgaatccaagagatttaaaggaagggacatgacaggtaaagtggaatgacagataaaggaaccaaccacgtatggaatgcttttgaatggacacagcaactcatttatgtcaactacccatgggaatgatattctgactcaactttgtgttggaaattcagcttgtattaggtcccttgctgcctcctcatggcctcctcatcacatgggctggttaaacatctaacatcctttgctagtgttagccttttctcacagatgctgatgaacagcctgtctttcaaaaacttaacaaggttctttgttggtatcgatatgggtaatttctggagcttgggagacatcctggacctaatggtgtaagatctctggcttgtgtctcctttcagaagagaaattggaaatttttttctagggctgggacaatgactaagaagggagctctttatctggtgttttctggttactacttaagtgtaactgatagatttagcaaatgaaaatataagacatccagttaaatttgaattttaggtttcagataaacaatgaatattccatgcattgtacaaacattgcactaaaaattatttatctgaaattcaaacttaactgggtgtcctgcattttggctggcaaccctgaacctatgaccactgtttcagggtattttcaggcatagacttgtacagtgaatgtgcctgtgaaaagatattatagacctggattgacaaggaggctaggaaagaaccccaagttcaaagggaatgcaaggttggagaattctttgggcgactaacttggggagagatgatttggttctcattgcccagagcattgcctctgtcttctgttctgctgtgccactgtgctatggccacaatgagaaagacttgtgctgcatcatcaggattgtatcaatctccattctcttcctatttgctgacacctaaaagtaaaaacattcaaggtagggttgagccatgatctctaacaggaaatagttattgaacttgactgtgtgcagaacatgatacctgtgctggtggtggtcagagggctgagtgtactctccaactgtcctctgttgtgggggcaaagtgggcattaagcacccccctgtatacagagctttccaccgggctgtgtgcctatagtgacaaaacaaatggaaaacacgcttgtgctcttgaggagcacagatatatgcctcttgggacagcagagagcttaggcttttattaactcaaaattggagttattctcagtggccccactctgattttgtggtgtgtgtgtctctccatgtgtgtatatagaaatattgcagcaatcatcacctgccattaagctacttttgtacatagtaattaggagaggtgcatggagtctggtcctgagagtgagatatggcaagtgatctgtggcgcttggtaatttgtggccttagaatgaagggaagaatgctcacttgcctgtttggggatgaaaactaaaaaatcttgatattttttagcaacacactggactaaggaacagtggaccctcccagcactgggcaaacattacacagcgtaatggcagggtggggaaaggactggatttgacatcagaagagaactgactttaactcctgatcttaccatttattagcaatttaattttttctgagctttggcttgctcttttatgagatggagacaatagcaatatgaggaaaattttgaagatttaatgacataccacttgaaaatgctaactgacagcaagcaccttgtatttgtcactgcggtgtttcccattctcatagcactttgtaactaactctgttataatgcttcatggtgtgttataattatttcttttatgtgtctgtctacttccactagactgagaatcaagggccattttcaactctttacttttccagtagcctcctgattaagccctggtacttacaaggcccatagttttgctgagctgtgtgtacttcaatacttaagctttgctaggaggcaagtctttaacttctgagtttccattctttcctctgtctctctagctctcttactgagaactgggaagatcccacgggacaggatctgtccagtcctcagtaagagtctttcaagaatattaccatctcaacaccagtcagaatggtgattattaaaaagtcaaggaaaaacagatggtagagaaataggaatgcttttacactgttggtgggaatgtaaattagttcaaccactgtggaagacaatgtggtgattcctcaaggacctagaaccagaaataccatttgacccagcaatcccattactgggcatatacccaaaggaatataaatcattctgttatcaagatacatacacatgtatgttcattgcagcactatttgcaaaagcaaagatgtggaatcaacccaaatgcccatcaatgatagactggataaagaagatgtggtacatatacaccatggaatactatgcaaccataaaaaggaatgagatcatgtcctttgtagggacatggatggaactggaagccattatcctcagcaaactaacacagaaacagaaaaccaaacactgcatgttctcactcataagtgggagctgaatgatgagaacacatggacacagggaggggaacaacacacactggggcctctcacgggtaagtgtggggagaggggaagggagagcatcaggagaaataactaatacgtgccgggcttaatacctaggtcacgggttgataggtgcagcaaaccaccatggcacacatttacctatgtaacaaacctgcacattctgcacatgtaactcagaatttaaaatttttaaaaaagaatattagaagatcctcattagactctaaatgcttgagtatagattcccagtattctcctgtgtactcaaacacatgtatgtttgaatagtatcccagcttgctaccctattctcagtaagttctaggatttccttgatgttctctccttttgacctctgcttcaacaaatttattaatttaatcagtgcaattcaagttcaattcatcaagcctttattgagtgcctcttacttgccagtcactgggctaggttttgggggtagagatgagtaaaatggtgcctccattagaagtgtttcagatttagtgggagagacagatgagaaaacagaatttctctaggatgtggttagggcagtgatggaggtggacacgttatgggagcacagaatagggctattttcctttattgtctttttcctctaagaattccattgttgaccaggtatggtggctcacacctgtaatcccagcactttgggaggccgaggcaggcggatcatgaggtcaggagttcgagaccagcctggacagcatggtgaaaccctgtctctactaaaaatacaaaaatcagccaggtttggtggcatatgcctgtaatcccagctactcgggaggctgaggcaagagaatcgcttgaactcaggaagcggaggttgcagtgagctgagatcgtgccattgcactccagcctggatgacagagcaagactctgtctcaaaaaaaaaaaaagaatcccattgtccctgcttactttctaacaggtgaacggggagccggctgtcattcctgcctcaaggagtattggaactgtgggagttaggaagctgccagtggccaatgtgcatcaattaaagacccagttggtagccctcctgcactggaggacagaaaagaacacttggaggcccaggacagcacaaggccacaggctgcatggccctggctgcagtgtggttgggagaatttggggagcaggtagtttcagccaaagactaacttggtgacatgcgcatacctcatggctggctctgtgagacccctgcaacaaatgccacctttttccttccctttttcaagttagctttgcttttgttctctttcccatttctctgacatttgcttctccccccagttcttatttatttcctttgttgtttatatccctacattttcttttactgctcactcttctatcatcttattcttctttccctctaccatttttcccctctacatttgagccttctttgccttttaattttatctttctgcctctatcaccatgttctgaaacataactgttaaactcagggttggagaggaaattttcatttccaacagggctttttatgatatgaaaagagtgtctcatgtgtatctgagtatcctaggaaacagaagtctaatttctaactcatattctgcatactgtgtttgaaagacatcatcatgaaaggagagtctcccacctgggcagcacaggagactgtgctgtgcaccttacctttattacaagaaccagccaaacaatgattccttcttttttgtggttctctatctccacacctatccttgaagtttctctttatctcgctctttctctttttctatttctgtcatatttttcagttctattttctatgttgcttctcgttcttttttctctttagtccttccctacttattagaaattatatgaccccctccttaatgtctttccttggccttggaagatagagtcaaaaggagtgtggaagactccactgccccaagtccccccgtttctgacgacggcatggaagtgtgactcaggagagatggggaagattcagaaaccttgtctagctcttgagattctttatgagtaggatttctttctgcttcttatttttaggtagtatgaacgtagactcagagaatcttaaagttgacaggaatctctattggttgtttaaataacctttaccccatgtaggatccctctttacttcctaatgatgctctacaggtagctcccggatacttggagttttgggaagggtgccagcacatgaagccgtccgcttggctgttggcagcactaattgtgtcagttaccgcttgcgattctgttgtcctggtctgtatgatttgtacctaatgattgtatatctgcttccgagggccatagggcatgcactttccatacagttctttttctgagattgaagacacgtcaaatagtgaaggaagttcaggtaccttctttaatacttgaactatttcagagaggttccatcagaaataaacaaaacaagccatttttgccaccctttgactatagaggaacccagttttctgaatgcctcatttcctgatggttctgagtagctgagattgttctggagggattatgggtgagaaacttcctttcattcttcacagaaagaagaataaaatgagcaagttttaaattaagattttattaatattagtaagctttgcattagccacaatgtctgtgtgtacattatagtttatagaacactcttaatattaaataccatgtcattttatttttataactagaccacgatacccccttattttagagatgacagaagtggggttcatagaggttgagagacttgtgttgagttaccccattctcaacagagtgagtcagacttaaactcagttcttctgctcttaatcttctgctatgtctttcataaatacatatatgtccttgtctctccaaagtccctgcaatgtcatgagattataggaaataagttgtctccttggtgtacacaatctaatagaattatggatttgtatgtgtgtgtatttctggatttggctgtggaacatggaaaaataggaagaaatccaattagggtcaaagagtggtttgtgcaattataaaaatactgatactatgtgaagaccattgaaattcttctccagttgcaagcatcagcataattgatttgtttggtaaaaattctgtcaaggtagagatgagtgagttacttttttactgcagttaatccagagaaatttcctgaaggagatagacaggggaacctaagaaaattttgaaataaaaaaatacaagggcctggtgggttggaaagaggggaaggagttgaaacagggcagagaggagaaaggggacaagtgttggggacaggaatgggacagatgttgtggcccttgtgttttgcttgggatttggaactagggttctggtatgatgataagttttccttctttgcaaagtaaaacccagatggctaaatttaattccacttggagccactggtgattcacccaagctcaggtgcacccacatacagctggcgtcagcgctgtgtgctttccaggctgagcttgcctcagccccgcttcctgcatggaacaagaggggaaaaccagactggtaaccttgacccttctgtgtctctgtctgcagcatcctggccactgcaggaacccacttcaatactcacgtggacctgaggaccctccgggctgtgcgtgtcctgcggcctttgaagctcgtgtcagggatacctagtgagcatctgccattctttctgctctgctaagaactttcttcatgtgtcctcagctggatccaggtctaagggaatttgggataaacaaacaatattcctcctgggaggaagcctcagtggtaataaatagtggagatggagcaatctggtgtaacattttactttacatttaactttttgcaaatataaaagataatagaaaatctttacagaaaatgtggaaagtaaacaacaaaaaagaaaagtgctctttatcttatcactcagaaatcacttttgttaaaatttcaatatttttcatttttcccctgtgcattttaatataattgaaatcgttatgtagattgtagttttatatcctgaaataagtattttattttcctaaccttaaaaattcttggctgagtgcagtggctcacacctgtaatcctagcacttgggaggctgaggtgggtggattgcttgagttcaggaagagtttgagaccagtctgggcaacatggtgaaaccccatctccacaaaaaatagaaaaaagtaaaaaaaatgtagctgagcatggcagctcactcctgtagtcccagctactcaggaagctgaggtgggaggatcacttgggcctgggaggccaaggctgcagtgagccaagatcacgccactgcactccagccttggcgacagaccgacactctgtctcaaaacaaaaaaattcttatatgtgttatgatttatttagccatttttatgttttatgttgctggatggcataaaaaataaaaataggctatttccagtttttctccaactataaatgtgctgcaacaaacacctttttacttaaatctttattcaaatctctgactgttttcttggctagaatcctagaaatgcaatgtgtgggtcaaaggatatggcattttctgaatagtgcttgtactaattgtgcttccccaacagagactgagaactgggtctgagatagagtgaatgggaagatgaactttatcccagctcttgaaggatttacagcctagcagagctgggcctaatttcctttaggaaaggagcacattctaataaatttaatctatcagaggcagacggcagcatggatgaaaccaatgagggaatgaaactaatcctcccctatcagatggtgctgagggacagctgcattggtcattctctgtccttccttctaggcctgcagattgtgttgaagtccatcatgaaggccatggtacctcttctgcagattggccttctgctcttctttgccatcctgatgtttgctatcattggtttggagttctacagtggcaagttacatcgagcatgcttcatgaacaattcaggtagggtcgttcttttctgtcttctccttttcccttctcccctctgttaactggggtaatttcagggcacttggaggctcattggaaaagtatgtcctattctgaccctggaattagaatcagaagcttctagtcagcagccttttgaggcacagtcaaccaagactagatatcctcacttgacattaatattgcaaagcaaatatgtagttggaagatttcaaatagatggtcttggctcccctatcccatggtcaagggccatgggaatgaacttgaaaagccatctgtctgagccaggcatagtggcacccacctgtagttccagctactccctggaggcttaggcaagaggattgttgaagcccaggagtttgaggccagcctggacaactagtgtctctctgtccctatctctctgtctacaaaaaaaaaaagtgcaacctctctgaatatctgaatcaatacccctttactctttgtacagcagcctctgactgaataaataagtactttttgtatagtggcctctctggcccacaggctggtgagatctaggagtccagagtcagagttgggtccctccggatctgtggagacattttcccttcatgatccttctcaccatcttctcgctctctgttttgacccacacgtggtatggaagaactgagggagctctgagcttggtttgcaagtgtgcttgggagattgttagggtacacaaccccaaattctcatatctttgtatttcatttgttcttttcaagttgagttgagtatcctaggaggaaaggagatgggaggcaggctgaagaattccaaataagtaccatgctttttatgaaaagaaccttaaaagaacactttccaccttggatttctattttttatttttatcttttattcaaaaccaggaatccacgctggaaaaacaaggagttaaacccccctaaaaggaccatagtttataactgtccccaagaaacccaggaagaactcagggctcatcctggagtctgaagccagaaaacctcactttgccttttcctcaaagtgtgccgtgtgattcagtcctcttaattcctgtggtacttcaggtgagggtagaggatgaagcttgcagagagcaggggactatgtggaggagaggctccatttttcaggagactgggaaacattggattgaacacatgatatgtgagctgggaggtgcagagaggccagggaggagagggagcctgagacaaaaaagggcaggcctctttccgtgggggaatggaattgcttgcctatggcttcctggggtcatttccagctcatgcgaaacaccatgtgatttatctcctaccctccaaatgtgtctgcaggtattctagaaggatttgacccccctcacccatgtggtgtgcagggctgcccagctggttatgaatgcaaggactggatcggccccaatgatgggatcacccagtttgataacatcctttttgctgtgctgactgtcttccagtgcatcaccatggaagggtggaccactgtgctgtacaatgtgagtagagctggtggggacctggaaggaggagggaagaaccctggatggaggcttctgtggttgtttggcctggctagtccggggacagggagggctatggatataggtgtattgggatgggaggtgaagactcaactgggataagccttagcagttcataaccctcttttgtctggcctgttgctacgtacaagtacacagcttcttaatacgattaggaaattacatcctatgttggataggtgaacaaattagttaagtcagatcaacttaatagttacagaatatgttggttggacgtggcggtagggtatagtgaagggtactaatgtatgatactggctgcccagtagaattagctggaagccttaaaaaattttatcaccccctcaggatctgggagaatttactaaaaaagaacaaaaagaaaagaaaaaaaaattataccaactgagctccatcccacaccaattaagtaggaatatttaggggtgaaggtcattttagaaaagtcattgacttttctaaaaagcttcctatctgattctcgtatgtagccactgtcaagaactactgcattacacacacataaaaagcatgcttaattgtgagattcaccaggggtgcttgttgaaaattcagattcacagaccccttctctggagattctaattttgtgtagctttgtatagctagtgagctgtgcttttttcaagtgccctggtgattcacatgatcagacatgttgagaaggttctgagttggtctagctgcctgtcagggatgttggggattcctgcatggggacagaaggtagggtgatcatgaagtctcttccatcttccagagtctaattttaataagttatcaaaggcttggtgcagactctatgctcaaaaatgagagtgacttgaggtatgtggtttgatgtacatggatcctaggtgggtaaagcagtttgggcaggtgcttttgaaggactgtacccttacctgcattcagccagcccaccccaaaacagtaactttggaatgatcatgcctcttatgcacgctcccaccgtctgcctttaccttaaggtgccgtctgtttccttcagttcttctctagatctttttagcctgattctatctgtataaaacttattaggtggaacataaggtggcttatacaaagcaccctttagaaagagctttggatataatttacactggagggaaaggaaatgctgtgtctcagaagaaactcgacgagactataatgcccaaagagcaaggattgtgtaaggcctgtaaaaggaagtacttagtagaggtccattgctaacctggatccattcccacataggatgagcaaggcaggactgaagctttgcagaaaagagtcactggctattatgctaaagctctaaagggcagtgaagaagtcccaaggaccagcttacacccagcaagcccagggatgaagtgtgacccagaaagccctggaggacactctgcagttctcaccagctgtgggaagcagcaggaaggaggggagggaggcaaggttgatgagtgcagtcactcctcatttgagatgtaaaggttgtcttgaggccatgccactcaaattagccaggcacctctaggaattgcagcactggccctgcagtggctggtgtcacatggagggctttgagagtgatgcatttcaattaaatgtgtagactcacctaagtgatgtgataaatgcattgaaagcctgaaaggagaagtgttgcatttgaggatacaggcgtgattgttggtcctctttagccaagattcagatggtactgagaggagaaggagcacagctgaagaaccactcattttttctttattagtttctttgttcattccttcattctttctgtgtttattaactgagcatctattacatgccaagcactgtcctaggcactagggaaatagggagaaaaaagtgccatgattcctgctatcatagtgctctcttcaaatccctctctccccagttacctgtcaaccacaggtttagaagttacacacaggcagagattttgctcctctctctagttttgctcactaaggagggaaggagggaggggaggagatcaagttgcagatactttgaaaccttttattgcatgggtgtccagggcccacagactcacatactctgacttccagcctgtcagtcattgaacttgagtttactgaaggcctcctgctattctgatggctggatttagggctagggggactgttacccaaagactgtctacctgtttggactgtctgctacctgtttggactgttcctacacacacacacacacacacacacacacacacacacacacacttatacacactggttgcgtaccatgaagttaactatgaatgactagtcagcttagtattataaatacatgtatacatatatatgtgtgtgtttctgcatatagaaaaatgactcactaagcatcaccacaaccaccaccaataagatacaaatataaatataactgtattgattttcctttctaccactcctcattctgggaaggcccagttcacccagctgctggatttgttcatgaagagcactaagagagggggatcccctatttcccagccctatgcaccttctattcagtggtgcaacgaacatgtaagatttattgttgttagttacatccaaaccagtaggagaatcttcaggtttacccagtaggaagaagctctcaagcatgtgggctcagtttaacctttttatatgcaatgtaaatgcttccctcatgtttgcctcccttttctgtagcacagactcttcctagatgcctccctatgaccttgtgttgctctgccaatgattactattaacttcatttgcttgtggcttttctcattataatgaattgtaagggggagggttcccattgtcaaggcaacctggagtcacctgtgcttcatttagtctctatccaaatgtcaactgcttggtcaaactccaactatattcttggcttccctccctcctctggtggaaggaatgcaaaactgtcgacagttctggctattgctacctgtttgcactgtctgtcccaaaggtctcctcgacttgcaaactctcttctttacttatttctcgtaacctgataagtatgtcttccacagtacaatgtgttctccttctgatcaatgctcttcattcaacaaatgttactgtggctcgctaaccctcttcacctgggctggaggtggctgagagaagtgactttcttctgattctgatctgagtcttatttctctttgtcattatagttttatgttatctgctgattcagttagctcttttattgtatcaggactaattcccagattgcagaggttcccagtccctgtctgcagttactcacatctttgctcctgaagtctagtatgtttcatttgtatttctgtagttggagttatttctcttcttacttactgttgataaactcatgtagaggcagaaatttcttggaggtgtactgtttctgcagctttgcaggtatgctttccgcatctgttgtgactacttaagatgctccaagctgctatggtggaaggggttttatggacttcattggcttttggcaagaagaggcaactgaaagtctggatgctttctgagagtcttcccaactcctcagaaatcttttggtctataaacaatgactgtggctgtcttttaagttgccttttcacagctgcatatagtcaggatttattaaatggttaacagctattcactttctgtctcattgagattttgctttatgttcctctatgagcatggtgaggcataacatccatctcgcagttgatgaaaaactaccattctctttatgaagttcctctcattttgtggtatctacagagaatgctttgggttctgagatccatgagactagggaatgtggcttccatctttgcttcagtcttttcctaccacctcctccacattatagtagaactactcaaaactaatttgacaaataggtggcaggagtctatgattatcttatggtgctagagtgataagatgaaccaactgacctaggatcaggtgtatagttcctaaaatttgtagacactgtaattgtgactggtattgtagatactgtaagtgttactgtaattgtaattggtatccaggatcactcatgctctggaataaactggtcccccccccgcctcaaacaaccccatctggactgccctgttcttatgtccttgcatgagtctgggatcctgtaatataggtgatgcttggaattggatactagtatctgttcatctgttacttatccatagagggattggtaagtggatcttggaagttactttctttttcccatgacggctgggaggtgaggtgtatgtgcttagtgaggagctatgataacttctttttaattggcagaacaccttgcttgtcaggcttttcatggagaggagagagtagagggagagggaaactatttcctgaactcacagtaaaggcttttcccctctgtttacattcatacataagtatagattcattcactaactcattcattcaccaaataatttttaagtggctactatgtgccaaatactgttctagatgttggtgatacagtagagagtaaaacataggaaagtcccggccctcatggaacttatattctagtgggaaaatgcatatagaacataaggaaaacatatggtatatcagatagtgatagatgctgtggagaaaaaaaatgtggggaaaaagagaacttggttgcaattttaaatggagatgtcaggaggaccacattgagaagatggcattcgaacaaagacttgaagtgggtgggtgagggagtgggccatgtggttatctgggggaagagtctcctgagtcccagatagctgggccagcaagtgcagagatcctgagatggggacgggctgggtgtatttgaagaacagcaaagagcacagtgggttgaactgcagtgagtgaggcggaaagtaggagatggaatagtcagtcagatcatgtggagccctgaaggccattatacagactctggtttttactctgagtgagatgggaaagcaatggagggttttgaggaaaggagtgacatgacctgacttgtgtttgaaaaaggatcactccacctcctttggtagagcaaaagtagaaacagggattcaaatcaaggttatagcaaggatataaaaaaaatgatagaggcttgggccagggaggtagcagcggaggaggtgaaaagtggttggattctgcatatatttttaagtagagctcatgggattcttcgatggattgaatatgagtttgggagaaagcagcaagaagagcggagttgccattaactaagctggggaagaacacaggtaaagtatgttgggaggaagaggagaattgagtttggatgtgttaaatttgccatgctcatttgatacagtagtatagggaagggggtgaataaatgagttcatggtagaaggcttggctggagaaataaatttgggagttttcagtgtatagatggtaaagtattgagactggccaaaaccaccaaggaagtgaatatagacagggaagagaggagattccaggactgagttctgatgttaaggtgaagaggaaaacggttatcagcaaagaagactgagaaggagcagtagggaggtgagaggaaaattagaaacctggtgtcctggggccaagtgaagagcgcgctgcagagggataaagtagaggatgatcaagtcagttctctgaagaagtgtttttcctatcatatgattattcagttaaaaaaggttattactagagtatcttgcaaataatttcttggtcatttgtataaattcatccacagattctcttgaattcacattcatatttactctttcaaaaactcttatctatatgctttgctcatttgaatcaaatgcttcagatgggtcaaggaaggtgagggctaagaaccactgaatgccaggagcagtttgagtggagtaggaaggatttcagagagcaatggaaacagcgtggaagaaataccacttacatgctgatgggaatgatccatttgagataaaaattattgttgatgaaggagagggaggagaattggtggagtgatttccttgaacaggtgtgtgtgtgtggtgtggggaggtctagaccacagatgtagggattggcttagataggagctctaatcatccattcatagtactaggagtagaggaagaacaagtggctgcaaaggctggtacgtgggtagatgtggtgttggaatcttgtagaaattctcttcctattgcttctattttctcaatgaaagaggaagtaaggtcatcagcagagggtggaaggaggaaaatgttgaaagtttgagaaggtataacatagttttccagaagactgagggagtaagtggagtaggaaatgcattgggttgctgggcagctttatggactcacttggagttagttgtgatgaagttcaagtgagaccagtgagcctggtgtgttttcctctggtcacattcagccactgaatatgggaagtaggtggagatttggcttttatgagaatagttttgccagttgagcacaataaaatgagagaagatcaagagagtgactataacatagccatggaatttgagctggataaagagcaaagaggtggcggagaaaccgtgaaaagggaggagagaacgtggattatagaccgtttttgaaatgtgactcttagggccgggcgcggtggctcactcctgtaatcccagcactttgggaggccgaggcgggcggatcactaggtcaggagatcgagaccatcctggctaacacggtgaaaccccgtctctactaaaaatataaaaaaatagccgggcgcagtggcgggcgcctgtagtcccagctactcaggaggctgaggcaggagaatggtgtgaacccgggaggtggagcttgcagtgagccgagatagcgccactgcagtccggcctgggtgaaagagcgagactccgtctcaagaaaaaaagaaagaaagaaagaaagaaatgtactcttgaatctgctggacaaattcagtctgtggagtaagttgagaaacctgtctcactgcatagaagtagggagtgggttttgaaaccaaatgttctgatttctaatttgatgctcgcactgcccccagtggaaggagagtgagtgtgtgcatgtgccgcacatgtgcagagtaagctgtgactctgggcgccggcgcaccgctgggccctctgtggcaccactcccagggtgtctggtcctgtttcagctcaattcagaatgtgaacttggggaacatttggggactgaaacccaccaggcccgcccacctacctcactagcattgtactctgtcatcttggtttcctcctcagagtgtctgtctctttttttaaacacacttaacgttgcagcttatgatgctgactttggcagcctgttctgttaatacttgtcctctctaaaccctacagtgccttcttcttggcccctgtctgctgggctgggagcctgtggtccacagccttctccccaccgctccctccctgggaagaaaccggcgttttctttctttctcacacttaactattttcccatccatagcagtctccaccctgaagttattcctactcattgcatttctgtcttggtttgtcaaaccaggatgccatcatgtttgggatttattccaaatgtgctaagtgtgcctcctgatctggtgcctgaatttcacaccacgaaccaggccagtctcctagtcttttgtctgtgcatagccattaggctggctcagggctcctttcctttttgtttcatttactctaatatgcggtttaatttctaatccatggccaaaggcctcaggtgcctgatgtgtcacgcagctttgggctatgatcttcctgttctcaggcaacaccaggccttaggactgaggggcagaaattagctggaggtggtgcgttggtgactcaatggctgtttcaggtacttttcactctggaatccaaatgctgacagaatctcagccaggtggggatggcacagtgccagtatatggcacactaggaaagccaagaagtctttattcactgttcctcaattcattattcactcgaagacttatgagcaatttttttcatgcccttcagagtgtggtccatcttggaatcatccaggggtaattattgtaattgcagattcccgggccctgccccagatctggtgggccagcatctctagaggtaggaggaaggaatctgtattttcagcaagctcccatgtgattctgaggccacgctgaagtttgagaaccactgttctacatcaatgtaattgccaggcagtaagagggtgacatggcacataaatgggagagtactgaagaaaaaggcacacttctgccttcaggctgcaagcctactatgtgaatttccatgaggtcatgcgttattcaatgtttgcctaacataaagtgattgacacacagtgggctctcaggaagtagttaatttatggacttaggtcaagaaggggcaataagtcaggtgcatgggtacatacatatacttgtaacaatagggcaaactaaatatagcgaataattgggagatatacaagcagagatctctgggaggattgaggagagagtggataatttaaagtgaactgctgagcctggcttggtggctcacacctgtagtcccagctacctggaaggctgaggcaggaggatctcttgagtccaggagttcaaggctgcagtgtgctatgattgacctatgaatcataggtcagcctgggcaacatagtgagactccatctctaaaaagaaaataaaataaagtgagcttctggacagcccatgtagaaatgtgaaagctggtgaactcaaggggagcccatgatactggattgtagcctgttggacaaagatgtcagagctcttgataacacatcaaaggcatcatttacccactgggtgcttagatgctactttatatttttaccttcctttagggacaaggctcagaaactgacttgaaagttagtttgcccaacccttttggtgggagggaagggttggatgtactaactttcccttaaccatcctctccttagctggtcctcattccatgcctgttgaaaacaatatgcgtagatttacagacctttgcctgcctccagttccctatgttgcagttagatgtcagctgtttggccacagcgaagcttcagctgcagctttccctgttgattgacatgtgtgccctcaattacacctcagttccctcccaaagagagggaaggattgaacaggatcttttctcctttaaggtgccaggtactaggggccccatttacacttctggagagctcttttaaaagggattcctgagaacctccactcttcactgccttccaccttgagccccattgtctgtccacaagaggaaacaggattttgtgcactgatgaggcagcagagtagtggagtcaattacaaaaaaaaaaaaaaaatatatatatatatatatattgtatttgactgatgagtacagctttggtttatcatctgcactggaatatctttgatgttttgggaaatcacaacactcaaatcagataaagaagccacagtgacaggaccaatgccagaggacctgggatatcttctgacttttgtcccctcagcttctcctagtgccccttttcttgagaagcagtgacccaaggcggggcccttccttgcagtgtgcagtcttcctcaccccaggagctggtgggtgggtcacagcacctgtgatagtcagagaggaccacttgaatttctgttctcctgagggtgccttgcaggtgctcccacccctccctcccactctccccactcaccatccccaagccatggccttcactccgaacccaggacttgtcagctggtatctgtggatgggctttgatggcatccataaattttgttgcaagttttgtttttaaaatatatcttttaactaccacattttcttgaatctaagatgccattgattatatactctatcaaaaattgaataattctgttattaaatttaagcattattaaatgttgggggaaaagccactgctttctatgcattatgtattcatatattctgagttacaaaaccttccactgtaaagaaaggtatattgtagaattgaggaaatagaaaatgaaggaataaaactgattttaaaagccacatgtaatccatgtgttatacaaattttcacacttgaagaccacccacagtcacactggcttaattcttttctttgtggagaccttggagtcaatctccctttgctatctctgcatttatttgagctttgtgtaaatgtggtattgattagaaagcttctagttctgtgttagtctttttaaaagaatcaggccccagcttgtttgcttttataaagtgatgtaagtgatcacactattacctttctgtatgattcaagattttctcaatactgtgaaactaaaataaaatacaaaaataagctggatgccaaagctgattcaagactgcaatagtcatctataaccctggtttcaaatttttatcttccagaaaacaacctcatgttttgagtgatattgaataaatgttctttattatgaatatatttatattaaatatatacaatatatttatgccagaagatgtctcatttttgtaagttttatgcatggatgttctgataaaagttttatttgaaaaaagtgatttctgatgccaaaggtactataacatagtggttaggaatcctggtcttactttactatctatgtgactttggcaacttacttaatctctgtgcctttatttttctatcagtaatgtgaggataattatggtacccacctcactgagttgtagtaagaagtaaggtaacatggataaagcctttgacacatgtctggcacatagcactcatgtgagaaattattagttaaaaagttttgaaaaccatctaggatagacaaagcatcttcttccattggcccactgtataaacctgctcctctcagactggtccttcctgtctctcagtctagccactttacactttccatttgcatcattgccaaccttgagtgtacactcttggaattacctccaaaactctgatgtcgccttctccacagagccttctctgactatccctgagaaattcaaaagagaggagatgcttccctgagccttctcccccagacctaaatgttattagcactccttcccagattctcctgtatcattcatcgtcttctaggtgtttacatcccttttccttattaaatgttctgtctcctggcatcaaccccagtcccctagacatggctaagtattcggtaaatatccactgatggattgatttcacagagtggctgtcggaacccaccaaagatgccatggcttccagactgccaggctgtcgggagatgcagcacaggttctgctctcagagtgagctgctgtccgcagggactatggctgctgcagcctctgcttgtcctgcctcactacagctcagctccctcctccagtgaccggtggggggtggggggtggggaaacaatgaaaagtaggggaaaggtaatttatttcagtgtttacagagggtttgcgtgtaattagcagtttatttctgtgacacagctggcctcctcagcttggaacctgactttgaaatgctcttaaagagacccatacctaggcaatctgaggggtgctggggacttgggaagagagtgaagaaaaatgtcatgccctgtctttggtgatgatgcttgaccaaggacagccactaaagtgaagactcccttgttccttctttccccaactctcccatgcatgcacacacacacacacaaacacacttttgtttcttgagtcatattctgttagtgaatccaccttcgacttagaccttttacaaggtacattttttttaaccttttgttcacatcaaagcttgggctttgatatcttcactggggataggggaacagtcacttgatcccctcctgccataagccccatgattgcaggcaaaacactgttctcctctttgtaagtattgaatagatgaataaataaatgtgcatcagtcttttcatcagtaatatgggggtaatgctgcctgctgtttctaccttgaaagttttatagcaattacatgagaaaaagtatacgaaagtgctttgaaaaagacgttcagccctcactatatgagtgtactatttttatgactttttgctgctgtgagctgtggacttacaaactcaattttgctaagttagcagtttttttgtgcttatgcagagtgggtgtctggttgcttcgggagcatgtaagacaaattatcctaacatattttctgtctcttagcatcagtttgctgtgtttgttctgtgttgtgagcgtgctcaggtcctgtgatcttggttagaaatacagtatttatattttgtacatattgaaaaacatacctatatttggtgcaaaagtggcactttaatagttcttgctaacttgcataaactgtgaataactggtgaaacctatgttgcagttgcttccaaattcaaacatgtttcagaactttttttctttttgaggtggagtcttgctctgtcgcccaggctggagtgcagtggcatgatctcggttcactgcaacctcctccgctcgggttcaagcgattcttctgcctcagccttctgagtagctgggactacaggcacccaccaccacacccagctaatttttgtatttttagtagagacggggtttcaccatattggccaggctggtttcgaactcctgacctcgtgatccccccgcctcagcctcccaaagtgctgggattacaggtgtgagctaccatgcctggccaaggacatcttaacctttgcaagtgttagggtagacctgacattcatctgtggcagtgttcctgaatgagctggggctgagcccatgagagagtctataccagaatagcataatggaaaaataatggcaatgtagtttttcatgaaactaaatttgttcaacttgaaactggatttaaacattgaaaatgttagtgtcctttcctggcaaaataaaaagttaagaacatcattgcgagcatagatatttttgtctttgttttgtgaaaattttgtgatctgtgaaggctaaaaatctatgctgatatatattttatctatgtaatagatataataggtaaatatattaatataattatataatttacttgcaaatgcataatattgctattagcaggttgagttttcttttccattctagtgatactgagatttttatattaattttaagagaaactggtagtcatttatgtaacctgtcattgaagaatgagtattttagaaaaccacataggctggtatagtgaatgccatttctaagaataaagtagtatcaggcattgggttatattcagaagacctgtatttgggccaagtgtttcacctaggctggagtgcagtggcgtgatcttggcttactgcaacctccacctcccaggttcaagtgattcttgtgccttagcctcctgagtagctaggatcacaggcccctgctaccatgccagactaatttttgtattttaatagagacggggtttcgccatgttggccagactggtcttgaactcctgactgcaagtgatccacctgccatggcctcccaaagtgctgggattacagacatgagccaccgcacctggctgcaagttttgtttcttatccattcttcctgactctgccatggtattaggcaagtcacgtgacctcagtgagactcattttcaacttctattaattaggaacaccaattcagtacttagtgcatacaatggctgtaagaattaaagaaaaatgtatgtgtgagagtgctttgtgcatcaagatgtgccttacgaatttaaggtattataaaaatcctttaaagttatgaacattcatgttaggaagatttctattactgagatttacaatacaggtttttcacgtatcatttttaaacatgttttgacagatacagtcaatggtatccctcagaagaaaggtagaacgtatattcaaaatattgttaggatatttctctttcctttgtgctcaaagcatcctgatatcatgaccttttcaagtgttttcttgatatgaaacaaagctgccactgcctgagtagtttgtataaaaacatcagatttctaggtgaagcagaaaagaaagggagtgtggagcttgattccttccccaggggtctctatgatgccatccttgaatgaatgatcaaggcgtgtcccccactgcctctgaaggtacttctcgtggctgccaccagctgccttaacaatttggaaggaaaggcaggcccaaagggcagcaggcacatgcacacccaggtgatcacacctccctcgtcccctgcacacatttaagctcttggcagcacatgttccccaggcacaggcggggctggcgtagtcagcaaggctgccacatctctgtcacaagcttccctttctcctagtgttttcagcaggcctgtatctctccaccatcctccccttcccgggtctcccactctcctctctctgtgacaggttctttttccttggcagattgcactggaatggtgtgacagtccctcagggatcatgccacctgcccaagctggggaggaatagcagagaggcatccgtggctggccaggtcaccaagataacactccccacaggcgagggtatccagggctcctgggactgcagattccattgcctcattgagccaggagccttggtctacgctgtaggacctcagtccacccaggaacactaaacttgcctgcctgccacttggcgctactataggcagctgtacctatcagcacaccatgcctgggaaggtgaccacagagagtaattgccagtgtttagtctgtgtgtgcatgtgggtgacagagcgaaaaggaaggtatggacctctcttttatatccaggttatttattgcatttgtcttacgacttccatttagagctaaataaactgcaaagtaggttatttaaactggatcttgggtgctttagcaagtggagaagtgggcggtgaggagggagaaagatgggagattgggccggggagattgagagaaagaggccaaaagaaacacaacgtggcttattttcctccccttggtagtggaaggcatggtgtgctgtggctcacagacagagatcccctttgctgggggatcttgaagagctttctgtctcaggcttttgggaagcagcctcctgtggacatatcttgcttttacaatttataaataaaaaactaaggcacagcctaggagtgcagattgcacaaagcctacagttacctaccgcacctggaagggtagctccccacttctttgcctgcttgtcacggtcacgtgccccctccacctgcgtcggacttgtgcagcctaatagagggcaggtgtacaaggaagaacgtcgttggggcattttatcgtcaccctgtccaaatgaggtttcagggagtctcatctccagagagtagtcttccacccaccatgtacgtgtgtgtgtgtgtgtgtgtgtgtgtgtgtgtgtgtgtgtacacacacatatttaagctcagatgccctgcaggcccagggagctctttgccaagagactcttggtccatccagatcactcgtgaattctcttttgtacagacttgataaagggtgtttcttgagtaccagaagtactgtagtactgtacataattcataacacgaagcaagataaagtagaaagaacaagaaaagataataactggggaattaaaagtttccaacattgttagaagctgggagagtgagtcagcagtacatatgtccttagggagagctttgcacagggctggttttggggtaggggcctaggtgtccaaaaaaggaggaaggagatgctcaggaggagcagaaatagggatgtggaggagaaggggctgagggcagggagaatgggtgcagattgcaagtgggggtgaattctagctctgccctgcctcctcccctccctttgaaggaaagagatatcatggggccttaatcatctccttatctctcattcctttcctggtttaattaaatttctgttctaatttggaagagcttgcatgttctcgactgctgtggcaaccaatctcttttatgagacccaccctggcactcagaggagtttatcacctccatgggacttggaccctctgtagcttttgccatcatggtcagttctgtagtgagcagaggtggatttgagaggagaaaggggctcccttattattgtcaaagtcatcttgtttacaatggcttcagtctgccccttcctcttcttcaccagggagtgaagcctcttctatccatgtatattttttgtgtttcgcattgtgttacctctcctctcccaggacaaaacacacttcgttgggatctctttgaatgttaaataataccgaaaatacagatgaaagacaggaaacgtggataaacgtaccatcagcattcctcttacacctactgtgtgcccaggcacagtgctgggcactctacacgtgtgactgcctcgaaggtgatggatcggtcctcatttgataaatgaggcactgtattagtccgttttcatgctgctataaagacatacctgagactgggcaatttacaaatggaagaggtttaatttgacttacagttccacatggctggggaggcctcacaatcatggcggaaggcatggaggagcaagtcacattttatgcagatggcagcaggcaaaataagagcttgtacagaaaaactcccattttttaagtaatcagatcttgtgagactcattcactgtcacgagaacagcccaggaaagacctgcccccataattcaatcacctcccaccggcttcctcccacgacacgtgggaactgtgggagttacaattcaagatgagatttgggtggggacacagccaaactatatcaggcgcttaaggcttacagaggttaaaggatcctcccaaggtcatacagctgttaaggtagaaagcccaactggaaccttgtcttgtgagctagaaaagcccaggctgtccccactactccctgttagaggaggacgtgagaggagatggatgaatgatttcggcaattcacttcaacttaacggacataccaaacattggagtgccgaccgattaccagggcccgtgttaggcattggatggtggaagagcttttgctcctgccctcagggagacaagacatgcttgtgttcagtggatgccttgaggaagtgttatggtccctttgagcattatggacccattgctgtggggtataaaggcagtggcggtgttctctctgaggtagccaagaaaggcttcatagagaaaccttgtagacatagaatttcaccagggggagaaggagatcaggacctgggcagaagcgtggtggaggtatgacatttgtgtgccgtgttgaggaagtggccacaataaaggagttggggtggaaaatgcctggagatgagactggggaagagattgggggtgagtgataaaggactgagtgtccattaatgactacagagttccttctatcagggaaatcatctcattacttgaaattatcaatgacttatctgtacatctttttgtctgacactgtccttgttcagtgcccccagggctcaaatgtgggaattagtctaatgaactagagttcatccctttcatgcctcctttggtcttttactgtggcccacatagccctgataatctgtccctggactgctcttctgtcttacttcacgcccttgcctcctccattgactgtgttcccttcaccatgactgctagccgtctaggctctttcctgcttcctggctgtggccacactgtttctgccatttttttttttttaaatttctaaattttgttttaagttcaggggtatatgtgcaggatgtgcatgcaggtttgttacataggtaaacgtatgccatggtgatttgctacacagttcatcccatcacccagataccaagcccagcatccactagctattcttcctgagcctctcccccctccccactcttgccctccgataggccccagtgtgtgttgttcccccctcccatgtgtccatgtgttctcatcatttagctcccacttataagtgagaacatggggcatttggttttccgttcttgtgttagtttgctaaggataacagcctccagctccatccatgtctctgcaaaggacatgatctcattcctttttatggctgcagagtattccatggtgtatatgtaccacatttgctttatccagtctatcattgacgggcatttaggttgattccatgtctttgtattcttcatctggccaatgcctactgatccctcaagcttcatcttaattgttacttccttagagagcactctcctaatcctaatataaattgagtgcttttggtataattttttaaatcacaatcttatttccttcatagcacttatcacctcttgtgtgtgtatttgtgtgaccatttattaagtttctgctctgttaactacactgtaaactctgtaggtgcagggatgtctattatttcatgactattgccagaaccttgcatatcgtgtggcatgtagtaggtgcttagtaaaaaatctggtgatttactggatggatggagtaataaattagtgaatgatataggatcaagctatcagcagggaatattcttatgctcagtgaaaacacaaagcctatgttaaatgaggcaaatttgttggtatttccaattgcatttttttaattcaacaaatatttgttgagcaccgattatagctaggcattgtgctaggagtcagggatatagtgaagaacaagcaaaatcagtccacctggaattcgtattatagtgtgatgatatctattaaacaatttaaaaaataagtgtatactgtcaggtagtgatgagtcatatgaagacaaagcaaaggaaggggcagagagtgttgcagggaggcagtatgcttcagatgaggtggtctgggaaggaggtggtatctgagcagaaatctgcagaagtgggagggaaagccctgggatatctgtggaagagcattccagatggagagccagcaagtgcagggacccaaagtggttgcttggcaggttcagggagtgtccaacaggccagggaggcttgagcactctgaggggcaagaggtcagagagagggtcagggccagatcaggttgggcctcgttgactgtgattaggagtttggattttactccgagtgtgatgggaagtctttgaggtgctttgaacagatgaggtagaagatctgatatatgctgaaagatcactctacctgctgtatggagaactggccatggcagggcaagagtggaggcgggcagctggcagtggtggtgcagcctggaatggctctgctggtggggctgagcagtgattagattgggatgtgttttgaaggtggagctggcaggacttgttaatgggttgaatgtggggtaggagagatgggaagatcaaggagggctcttcagctacattaatctgttaatagcggtgccatctaccaagataggggagccgagagaaggggcaggatggttgagcaaggtcaagagttgagctggaggcatgttaaattggagtggcctaattgatgtctatgagatagcccagttcgagatgtcataagaagtaagtagctggacatctgagtctggagctgggtcagagcaagagatatacacttgagaaacattaatttattaatggtgttttgaatcatgagatggactgatgtcccttagtcttgaagaaggcatagacagagaagaggaccaacgacttagctctgagaaactacaacttaatgtctattagcactgcagtaggtctattactaaggccctgagaacttgatcatcttctcttggggctatttcttctggaattgagcccaaatttagtgttgttgctccttttaggaagttattatgacaggggctactttgccataggggatgaaaataggaattcccactaccaccccatgggctagctgaaggtgcagggcaggtagagattcgggtgtggagggagctcttcagtctgagtctgttctgttttggttcattttccttttgtctgctgttcttctcctgtgaaaattgttttccctcaagctgatgtttttaaagcttaatttttatttctgtaactgtactccttttcattctacaaacctttattgagggcctgccatgtgctagacactgctcagaactgctaagtgctgggatgctccctttccaaacacacggctcctccccgtgattcttttcctgctcaaagccatctgctctctcccacctggtcctcattttattgatggctattacatcatctacctgtccatcatttttcatacctcttatatcattattagatgttctagctaccaagtcttggaaccagtcttcccattttgtcttacaccccacatttaactcatcagtagctcctttggctctatattcaacatttatccagaatctgcctaccaatcctgacctccagcgctgcaccctggtctaagccaccaccatctcttgcctgagttagtgcagtctctccctgattgcatcattaccccacttcagaacatccttatgatcctggcagtgtaaatcagaccatgtccccgctctgcacagaaccctccagtagctcctcttcccttgctgagtaaaagccagagcccttgcaagggtctacagggccctccatgatctgctcttccactcccttctgcttcttgccttaatctgctccagcacagtagccctcttgctgcagatgacatgttgggcatgcttctgccttggatggaaccttgctaacatgggtcttgctggaacattcttcccagttatcagggtgggctcactctttcccgtcctctggtctttactcggtgagttctttcctgaccatcgtatttaaaatcaaacctcctccttcccagtactctcttaactccctttcagatgtatttctctccagagagcttatcactagcgaccacagtatatactttgcctgtttattttgtctattggctaagtgatcccactagagtacaagcttcatgagggcaggacttttgtctcacacactgctgcaaacagttgatgctcaggttagtacctggcagaaggtaagtacagattgagttacttttcattggaaatgcttgggacaagaagtgtttcagatttaggattttttcagattttggaatatttgtattatattggttgagcatcccaaatccaaaaatgtgaaatctgaaatgctccaatgagcatttcttgggccatcatgttggttctcaaaaagttttggattttgaaagatttcagatttcagatttttggatttgggatgctcaacctgtatttaataaatatttgctgaatgaataaatgacagaacatgagttcatgggatgggagggtggtcaatgcactgtatttgttctagttactgttactctcatagtctttgcactaggccctttggtgacaagtgggctgcatttgtgagatggttggatgccattagggacctaagctgtgttctcagaatagcattgccacactagaagccagttggccttagcaagttgaaccatttgctgggatgtccttagtattattaggcaaactgatcatccaaggtttagggttagatgaatccacaaaagagctcattgaggttgtattaataaaaacaaccattcattgagtccacaagatccatacttacgcatgaaaattactctaggatctcttgctgggggataggtgggggatcagaattgccaagggtgtcctcatgaggaggcctccatccagcctcaacaagccttaaacacctcattcaggtgccgtagcaagccttaaacacctctgggtagggtttgaatctgtaaatgaatcagaggtaaatgaatcttaaaacctactggccttaagaattggaaggccccttgcttatatccttggggatatttactgtggtgaaaggatgagggtaaggaatgatagcaaacattcacagagcacatattatatgccaggcgctgttctaagagcgctctgtggatataaacccagttaattttcccaatagccctttgaggtagaaagattatattcccattttacagttgagaaaaccaaggctgcctgtctgcagggtctttgctcttgttgattatgttacaaccatctcaaaagaagtgttgttctagggccatttaggatgatacactgatgtttaatacacttatgtgttacattttgatgtgtggtattgttgtggggagtagctagctgtgtgtggaaacggacttttcatgaggcatgcatgtgtgaacactgtaattagtatttccaagagagaaaagcaaccccctcccccgcccccgccaacaccccaacactgcacctacccggagactttgctcgtgacacatttttttttccccataggagagaatgttaaagtagggccatctcttagatgaaagtcctagaggctttgggacatatgaagactggtcagatgctattgagcatttctcacctttgatcctctgttctgaggaattcttgatagcctaggactaatctatagttctcagaggggccagttgtcttgttgcctcctgttctcgcctccgcctgcctgtctccctggctctgagtctctggtgatatgtactggctcaccgtcaggtgttgggggatggggaggcggctgtgcagctgccgccgagctgctcacttggtaggagaagtgtgccactaagtgaaaatgaggcttggcgactgccctgtgacccactgccctctgtaccttgcccttccctgtgggtggcagagctagacagccattctcatcctggaaacgctggttttaagggagaggccagtcttcttgtgtttgctgcacccatcctgacttggaaggaaggtctttggtgactccatgaatggcacccaggggtccagtcttcaagttccattgctttctctggcctgtggctcatgactaattccaccccaaccttgtctcagactggggtcccactcaccaccagggcgtgagcttttggggaaccctccctgcttgtcagcccttcttttggaggagtaaccaggacccccagaccccacttttagatatccgggttcaatataacacatagaactttcccctcttcttctgggcaagcttgagatggtgtttttcatgaaaagggccagctgagggatcgtttcagagaagcccaggttggctacactttccttaggatgagactgggacatggaaagtgggaggagaaggagcagttgggtttggcccttgcaggcagtattttcctctggactaggagatcctctgcacagtgccaggcctcacactgcatgtaattaggcttctaatgccattttctattgacaagggcaagctgctgccaagtcacttgagatgaaattgggtcacctgtcacaattcctgtgggactgaggtagaactgtgcttactacacactttgccctattttaacctctgactggatctgatcccatatcttagctggaggaggagatgagggaggagcgggggcctctcagagccactctgatcctcatagggtgggaacttggcccggggatgccttgcttaacctagcggggagtttcttaacagaggtcagagtgaatcttttatccctttctaagtccaatttgtaggacatggggaagacagtgaccccaaattcccagtgtgggagacatgagagaggcctcatttgtcactctgagtcaggaggaggaacgggcagttatttgtcttctctcagaaagccacgctgtctagttgatagctcttctctgagaatggaaataaggagagctgtccagagattgagtgagggaggagagggagagaaaagaaagtgcttttgagtgtgtgcatgcatgctcatacattcacgtgcttaacttaggaggcaatttcggaggaaacagagagaaagaaattagaacaagcaggaagagttccaagatgggggagaaaggggcataacatggacaaaagcctgcctaaagaagcagtgaatggaccacatgcaattggggagacagaagcagaagaaaaaggggagggtggggtgggggagaaagcaggtgggggctgggaagttctgcctatgtgcattgtcttccaggtgcttttgtaagcctgagccatgcccaaggcagcactggcagctcaagctcaggccaaacacacacgagaagagtatcgtattgtgtttccttttcttcgtgtttttgaaacaggaataaaaactaccaaaagagaaacacaggaaaaaaaaatagaaagggaaaaaaatctattcaaggaggcatgaagatttaatcaacacccagtgttcttagcaggtcgggagcaagcacaaatcgtattgtctatgcagctatttctgacaccccccagcagccctcagagcaacctctgccactgcccagagtctgggaggcagttcctgggttccagtgtcctgggctattttgggtgggaagaattgctgagccagtcaagggaatggggtacagggtgtgtcatcttcttgaggagcttctcagcatatagagatttccggctttacatggtaggtatttgtccagatggagattttggcattgacatttatcctaatgtgctggatataaacttgggggtaattcgggaatttaaaactcagccatgttaccttcagtacagtatatggatcaatctcttctgctttatctctcagtggcattcaacacggttgctttctctctctttaaaattcatgactttggtgccattacaccgtcctgtttccatccgtctttctggttgcttcttctcctttggggctctcatttattctcactccctctccttctaggagatctttttgaagtctcttgactatacaccaatgagttgaatttctatttccagcccagaactctcttctgagctccagactcatatctaatcagctactgttagcaccgttctaaatacctgagactaccaagccttcaactgagggcttgatccctctgttgttctctttcccacctgcctgtcctagtaaaacagctctaccacctacggagttgcccaagccaaaaacctcacattgtccttctttttccctactccttcaccctcttgttttctgtctgccatcaaacagcaggtcgtatggatgctacctccaaaatatatccccggctgcgcccagtcctccctccccattacatctaccctgacctggccaccatcttctttgcccctgatgactgcagcagcctcttgactgtctttccagctttcttccttatttctcttcaatccattctctactccatggccagaaggatttttaaacaatgcaaatgtcctatgtcacttccctttttataaaaccctttactggattcatttgaaatacagacccaaagctaacatgatccataagacgagtggcctctgccagcctttccagccttgcccttgttttacccatgctggcttgtgtcagaatcagcccccaacccgactccatcaacctcagaacctttggacatgctgtcctgcatgcatgagggtttcttccttcggcggcccctcccatttgggctaattcctacttattgtttccatctcagtgtaaaggacatatcctctggaaaatccactctgatcattgaccctaaacaaagtcagtccctctcagaaatcacactcatgaccctttcaatttttctttggaatacttaccaccattgtaacactccagttgtttttggaatgtttaataccattctacctactaaacctaagctccatgagagcagggccatgtctgtcctgttcactgtggtgtctccaggatatggcaccctggatggtccatcgtagaggttgaataaatgagtgaatctatctcgaacacttttgtgcctagggctttgattcaagcacaaggtgagagtggagcagggtgggatgttctaaaagacagaataaagaattcttgtccttaaggcccctcctacctagtcctgttctgttttgtgttatgattatcagctatgtgtatataaactttcaccaaataaagattgttgctttttgaggattacgtcttaaattttgttgtcacactcactaggtttcatttccttggatgttttatagacatgtatgtacctttcagtccctgtctaggtggatgcaccttcctccccttcccactggtctgtatccttgcgatcccagcgtgtgcggtagcctgaactgcttgagttatgacagcctaagagctgggcgttcctggccatggctcttattctctagaagcttcagcctttctgcaaaatgcgaatgagattattaatggtaataataccttgtctatctttcagggttgttgtgaggaaaagatgagttcatttatgtcaaatactttgaaaactacaaagctccatgagagtgttggaattaagtaaggatgctggggagtgacgagagatgagcaattgctcttaactacagagaagaaagtttcctgcaggaggtggagattaggaatgaggctggaaagatggtgtttcaggcagcatcctggcaggaaatggaaggcaacttcagctgggttttgaagagggtttagtaatggtaccatttcagggatgtggacaggaatatgggactgagaagccatacttagaccctggggattagctattgtgggatgtcatttctagtcctgggcctgaaggagcaaggtgaggaaatgaggttgttagagcctggtgaggaaggaagaggggctgcctgaccgtgaccacagagggacctcaacctgcctgaattgccacactgatgcttctggtgccacctcttagaaactagagggctagggagctgggtgatgcagtttgtagggcctcacatctcagggcacagagaagggtggaaagtaggtgagggaggggcaggtaagtggagaataaccagtgtggatgggtattatttgggaagacagggaggagcgaggaacgatgaggatatccaggtaaggatagtgatgggagaaaaagcagaaaggctggagaatacctatggagcagttgaagaaattagtgggaaataggatttaagaagttggcaggaatgaccaaaccatgattgtcaggcttggaagactgggctttatcctgcagacaaggggggctacagcagttgtttccacagaggagatccattatgaaaactgtctggagaaatggtttgggcagaggtatgtgagtagagggaggcaaggaatgaccagaacactgttgtgaccaccggtgagaatggagagcgctgggtgaacacaagaaccattgggaatggatgagactgaatgcaagggcatgtctacaggagaccccagggcacagagaagccccaagcctggcatttctgagcaggattgctttgctcgatgccaccttctccctctcctctattctagtcatgtgccagggctttgtgacccgtgcttttctgttcttttccttgggacatctctgctactgtcactgctgcctcttcccttatttctgaaggtttcttccacatttctccttattgattgtatattattactgcaactcatgaatgaccgtcagaggtttctgagcctacagggctggggcaggggtgtctcctgaccatttcaatcttctgccacagcctggaccacacagacagctttagcatcagaagagatggccacacccagagctgggcccccagtatccacaaaggaaagttcagcttaggaagaagaaatggggagagaacatttttcttccttagcacctgaatgaatgctttgcccagcagggctacctcccgccagtctctacctttgttgtaatgccaattcttatttaatgtctgccaaacacaaaaggtccatcaggatcacgtggaaagaaagtgaaatgctggcggtgccccctgggtgtaggcctgaaataagatgaacaggaaataaaacataactgcagggaaggcgggccctagacaaagaatggcagtgggcttgcttgttcctcctctttgctcccttcctttcaagcctcttgctttgagagggagaggcttgtgtgtgttttgtatgggttggtagtgtgagaaggaagtcaagatgtttgggaaggatgaattttgagggaggatgttaaacagaagaacagccaagtatggggaaggattgggaataatggccctaaatgtggcagagtagaaagagaaggaaaagaacagagtgaaaaggcacaccggtttcagtgtggcagaaggagctcaaacacagggtggggagttgatgagggctttgcttggctatttgtgtgcaagttatgagaaaattgctaataaaccaatgcaaatcatcatttattcatgtcattaagcactatgtttagctccttcgtgcattatcttattctcacagcagttgtgtgagctagaactctattttctatgatttgcctagatttgtagatgactaaactaaggctgaacatgagtaacttgcccatacagctgacaagcagtacgctggatctgaaactcaagtgggcaaaaccaggatggtcaagggagtgttccttctggacatagctcctaggcattaactcccagcatattggctggagttagagaagtattgccaggacagagcacatctccatcttcctctgtctccccatcccatgtcttgttatccagttttgtggcccctggacaccaacacagtattcattggatggtgaagaacggtgggaaaagcctggtccatttggtgtgcacaaagcatcttcctgacctcttactgtaaaagccatgacagtttgctccctatgttgtacaagagaaaggataaaagccttttgcctccagtgttacagagagagtctgtagactgggcatacttcctgaaggcaagtcttttcacagtccctgcacataagtaccaattagataatttttccagccatttcctcattcccatcccaataataaaccaataatctaaacatactaaggttgagaacgctcctcccaaatatcttgggtaattggatgatctacagaacgtatatgaggacttgttgggtgatgcccaagtgctatgtctttgtctgcagcactttctactttgcgtggtctataaaagacagctacagaatacagtgtggtctgtctttggctttgaagttggacatgctgaatattattaattattccttgcaatacagcaaaaagttctgatccaaacattgtttcttatgcttaagtttgttgaaaaatttgaaatcaggccttgtgaatttgatcatctaaggtcttatttgcagagacatgtacttactcaggtagtaatgtcaatagagatgtcctgaggctcaagaaatccctgtttgcattgtggtgagctcctcagccacattggagcatcttgggtggttccaatgaggacttttgaggaccagctcagccccatgcacaacagcatgcagttttgctctaatataaataaaaacaatggaagtagctatttttattggacttttactattataatatgtgctaggcactatgtagagggcttaagttcattatttccaactcttacaactttgcaatctaacattactacaatttttttttcttaagatggggaaacagaagagttaataactcaccaaagtcacagctcagtccatgatcttagcctctaccagttctgaaagacatgcctcctgctgtgtagtagttccaacagggcatggttctgatactaatccatttccatgattatgaacaagcaaggccttggcaaaattgtgagatagtaaggcatgccttctagctgccagcccttttgtcctttcccttagaacctttcgtaaaattctccacccccatcaccaccatcaacacacttctacctctcactgtctccactagcaaattcttttccccattgattccttcattcatttcgtcaactgatctttattgcatgctgactatgtgctaggtaccatggtgggcactgctctaaggaaagattctaatttcagttacttccatttttgcttgatttttaagtcagtgtttttttttttttctcagaagcaattcattctgagtgcttacctctaatcagagaatgaaaaaccttgtcaattatcaaaagaatgtgagacattagcaggcagatggtgggttttgggcaggtgcacctctactgtcaagacagttgccattcttcctcaaggataagatagacctgaggtacacagaagtgagttcatgcatgatgtggatctacctccagaggccctatcccactagataatttgtagattcaataggggaagggtgcttcctgacttagaaagcagatctcagcctctgaccctatccttgcactgtggctgagttatgtttactgccatagttactatagtgtatttaaagctataatattgaaagaccctatggttggcagatttcttcttgggcaacaggcttatgttacagttcttagataaagaccacttgtatatgatcattctagtatgcaaccaactctctgtgatcatctctgatgaaattctagttgagaataaacttttcccttgatacatacagaaggcaaaaaagatattctctaaaaaaacacgcaagagaagatttccatctgaaggccaatgcaccaatgcacctaagagcagagactgtcaagtcaccctacagagtcttcctgtcccaggagaaaacacgacacttgagattaccatacccaaaaaaggatgaccctctcatggcctggccacctatggaagcaagggaaagagcaccagaggaaagaataggtaggacccatcccaacatctgtagggaagagggagctccgtccaagggctggactttcaggtctctctggaggggagcaggctgaaccatgctactgcagcctaatgccactgactatctcagtcacgtgatgcactctccttgctctgatccatcttccaatcacaaattgacttcccaggaggcttgcctgtgagagggtgatgggtttacctgagctcatgtgggccctggtctttgcaaggttttatttttcattggaatgctcaggtgtagtgagttcgacctgagaaacaatcaactgtcagggctgatcaatcaggtttgtgagcaactgacattgagggctggactctggagtagatagagtttactcaggaaagcctctcactagaggcttcctgggagaatgctgtctggcctgtaggcaatagtccttgatgccattccttttccagtttggtgatacttgactctgagttttctttaaggcagctgggacagttccatggagggtagactcatgcacagagatatcatattcataacggctctttgctatacagctactgcaatctacaatcccacacaagataccccctccttcagtttttgagtacacatataactgtcaggttgactgaataagtttgcctatcctgaggtcataaagacagtctcctgttttattttctagaagttttattggtttatttttcacatttagtttccaatccacctggaattgatttttatgtgtgttgtgagcaggagttaagatttatttttttatgtggacatccaattgacctagcactatttattacaagtttttattttctctgttactgtctgtcacctttatcataaccatatcctgaccacgtgtgtatgagtttgcttccggactctgttctattccattgtatctctttgtatcaaataccacacagtttcttaataactgtagctttataataaaagtcatgtggtgatgtaatttttctaaatttgttctctattttcaggtttgtcttggttattttgttttcttctcagcatttatgtatacatttagcctttaaaaaacatgagggctaggagtgctgaccacctcctgggcaaaaatccacatataacttttgagaccccccaaacttaactactaatagcctactatgggctggaagcgttactgataacgtaagctgtccattaatacatattttatataatatatgtgttatatactgtattcttaagatagctagagaaaagaaaatcataaggaagagaacatatttactatgattaagcctaagtggatcatcataaaagtcttcattctcttcattttcacattgagtaggctgaggaggaggaggttcttgttgtccaggccttcttattgtacaaccaaaagactggcagctggtgtttatcttttcccttcaaggcttgggggttagcaactttatgggtactttatcaggaaggtcctgatcataaacctaactgcatttgcacaaaacagtagagttagcctattccttccagccttaaatcctggtgctcacttctctcccttactaataaatgtcctttgtggcatatttttttcccaaaatagggcactttgtctgcattaaaaccacttaaggtagacatctttcctcctcgatgatgttttttcactggtgcctgggaactcctctgctgcctcttggttggtagcagctgcttctcctgttagcttgacatttttttaagccaaatatctttctaaaattatcaaaccatcctttgctggcattaaagtctccagctttagataattcacattccttttcctttgtcatataatgacttcaatttttttcaaatcaaattagtctataggtatgccttgcttatagcaatcctgcacccatgtaaaagctgcatttttaatatgagataaaaagatatttcacaaaaagtataatgtttttgtacctgctgacgtagctgctacaactacttcgcaattttcttttcttttcttttttttcttttttacaatgatccacatgttggattcatttgtcttgaaatagcaggtagccacagctgtaggcctcaatttatggcaaatatcaagcaatttaactttttcttatactgtcatgacctttctctacttcttgggaacacttccagcatcactagtagtgacatttcttatgggccccatgatgttattcaaggtttacagtattgctctaaacacagtgaaaactatgcaagaaccatgagagatcactttttactacagcatgcaatttactggagacaattgctcactcagagatgattattgtcacatggtgtttgaagcagatacttgcaacacttgagctcattgcaatagcaacaggaggtggctacaaaaatataggcagtagtacagttacacatgcagttaattttatgcagttatgctttatactgcatctctacatttgtttacatttctcttaactaaatggtatcatgtacagtctgtaaatgtgtggataagttttgatacattttaactttttataatctgtatattttatggtagtaaatgatatagattaatatctacatatattttgtgcattcatgacatacctaactttgatatttctaggttacacagttctgtaagttttttcaaattgttgcaaacgtccaaattttttttccaatatatttattgaaaataatctgcatataagtggacccatgcagttcaaacatgtgttgttcaaggatcagttgtatgtactttagaattatcctgtcaatttttactaaaaaaactcttgctagggttttgattgggactgcattgaatctatagaatattggggagaattgacatctttataataatattgagttttctcattcatgcaggtaatatagtcatccattcattatatactttttctcattaaagttttatactattttgtgtagaggtctgatatatcttttattttattctattttttgagatggagtctcactctgtcacccaggctggagtgcagtggtgcgatctcggctcactgcaacctctgcctcccgggttcgagcaattctctgtctcagcctctggagtagctgggattacaggcacctgccaccacgcctggctaatttttgtatttttagtcgagatgtggtttcaccatcttggccaggctggtcttgaactcctgagctcatgatctgctcgcctcggcctcctaaagtgctgggattacaggtgtgagccaccatgcctggctgatatatcttttattaaactcattttgatgctatcataattggcattatttttaaagttctgttttctagtttttgttgccagtatataaatatacacattaatttagccatattcagctatcttgataaattcacttaccaattttagtagtgtatctgaagattcttttggattttctatatatataatcctgtcatctgtgaataatggtagtttaatttttcattttcaattcttattccctttttatttctcttatcttattatactggctaggaccttgttataaattaaatagaagtggcaataatggaattcttatctcattcacagtctcaatggaaaagtttcactgttttctcattaaacatgatctttgctgtaggttttttatagacaccctttttaggactaagaaagtttccttctattcctaatttgttaggtgtttttaataaacacaagttgaactttactaaattttttttctgcagctattgcactgatcatgattttcctcctatattcttttaatatagtgaatcacattgatttttcattgcaaccttggagtgacatcacctttgttgtgatatgttttttctatatcattgggtttgattttttacgattgcattatctgttttcacaatagaaactggcctataatttgcttttcttgcaatgctcttgtgaagttttgatattaaggttaggtttccttaatgaaacaagctagatatgctgtctttttctactctttggaagattttgtaagattgaagtattttcttccttagagttcacccatggagatatctgggcttggaggttttttgtttgtttgtttgttttgttttgttttttttgttttttattgtggtttctaccaagttgtaatttaacacagtggagaatcaatctgttatttaccatgttgaaagaataggctggggacagtggctcactcctataatcccagcactttgggagcccaaggtgggtggatcatgaggtcgagattgagaccatcctggccaacatggtgaaaccccatctctactaaaaaaattacgaaaattagctgggtgtggtggtgcacacccgtagtcccagctactcgggaggctgaggcaggagaattgcctgaaccggggaggcagaggttgcagtgagctgagatcgcaccactgctctccagcctggtgacagagcaagactccatctcaaaaaaacaaaacaaaacaaacaaacaaaaaaaaaggaggtggggggaatcatggaatcaatgcagaaaaaaatttaatgaggttcaaactttctttgttttgtcttttttatgtctcttataagttacagatttaatttctttgaaagagaaccattaagcttttctacttcttgtgtcaattactgtaagttattttttgaagtaatttatccattgcattcttattttcaaatttagttgcataaagctcataatgtctccttattatcttttaaaacattcataggatctgtagtgatgtccttttttcattcctgatggtgataatctctgctttctccctcttatttatttatatctattagtcttgctagaagtttatcaaattcattagtcttctcaaagaaccaatttttggttttgttgatttttctggattgtaaatttatttttgtttttatttatgttctttatttccttctaaatttgaggggtttaatatgctgttctgtttcaaacttttccatgcatatctttatatttaaggtgtatttcttatgagcagcattttttttttttcctagtgggagttgttagtgtgtgttttgctcatcatggtattttgtacctggaatagtagctggaacatcctaagtcttccgccagaaaatattgaatgaacgagagaatgagcactgaggtctttgtcaagggtggaaggtgggacagagatcatcaggaatctgagtttgtcctgcaacaagtgaatcggtgcaactcccttgaggacttttgttctctgtgtattccctatctgacgatgatttagccagtcttcatgcttatctgtttcatgccaatccccctatcaagaacttctgctttccttcttcccacctccatcactcacaattatagcagtgaggggtgccacaagcttaagtatatagcatgttctttgccaacattcccaacaacccctccttttcaatgttctctcacagaaagattgcctcccacacctctcttcattacaaaagagcccaaatgactcctggtattttaaggggcgcaaagttatgacagtgacagagcgatgtggtattagcaaaatgactccgttggatgtgccattagggctttgcatgtcatctgggtgactgctgttttgtccacatttagctgggtgagccccagagctgaaggagtttattttcggtgtaggaagaaaagctttttggatttgcctgtcggttccttttatttttttcaaagactccaaagttgatatggctttttccccctgccttgcttcagaggcccaaagatgtagacaatgagtctctgcatgacatttaattcgcctacggtgctgttttgaatgttacagatgaaccaactatgaattggctgtatgtctgtatttatatgaatatgtgagacaaggggactagatgaactagagagaagcattcttgggaagaataagaagacaccagcgaagagatggtggtgggcatggcagatgagagtcacagtggtagaggggacttcaagagatcatctgggctgggcgtggtgactcatgcctataatcccagcactttgggaggccaaggcaggtggatcacttgaggtcaggagtgtgagaccagcctggccaacatggtgaaagcttgtctctactaaaaaatacaaaattagctgggcatggtggtgcatgcctgtaatcctggtcactcgggaggctgaggcaggagaattgcttgaacctgggaggtggaggtttcagtgagccaagatcgtgccactgcactccagcctgggtgacagagcaagactccatctcaaaaagaaagaaaaaagaaaccatctggttgagtcctttgtccttcagtagatgaagtgtcctcatccatattttatagacaatacaattgaaatccagagatgtttcattatttgaagaagaagttggaatctgattctgctagcctgtgaatttcaaaggtcaaagactatattgacgttgatcactgttgtattcccagcacctaattcagtgagtagtacagggtaggtgctcaataaatatttgctgagtaaacaccaaatatatacctacagctgctgaaaattcatttatgttacactttaagttgttctccagagcatctggttaatctggctctaaagtactacaaaaattatcagtttttaaattcatagatacatgataacaagtaaaataaatggatttcagtttattagatgagggttcattcatataacaaatttttgttgagtatcaatattatatacaaagcactggtctaaatactggggatacatcagggaacaaaacaatccaaatccctgccctcatggaacttacattgtttacagtgtaaaaataaaatagataaatcatatacatagtgcattagatggtgatacagtacaaggggacggggtcggttttggtaggagggcctgatggtgtacttttatatggggtagttaggaaaggcctcacagagaagttgacttttgaataaagacctgaagaaagctagggattaagccatatggacatctggggaacaagcattttgagaaagaacagcaagtgtgaaggccctgaggaaggagggtgtctagagaggtcagggaggagctaggagaaccatatggatggagcttatcaactaggggagccaggtcaggtagaatcctgtaggtcatgatgagactttgactttaacttggggtgagttaggaagcctttggagagcttcaaagaggtcagtgacatgattcagcttacatttgaatagggtcaccctagctgctttgttgggaatggactgaaagggggcaaagatggaagtaaggagaccagttaggaggcaattgcaataatatgagtgagagatgatggtggcttagcccagagggtagcagtatgaatggtgaggaggagtgaaattctggataggttttgaaggaaggaaaggctgatggatttattgatgaacctgacatgggatatgcgagacaaagggggagggtcatgattatttgaaggcttttggcttgagcagctggtaggatggcattgtaattaactaagctgtggagaatggtgagaagagcaggtctgtgttttattggggaggggggaaggatcaggaactcaggtttaaacgtgaagttggaggtggctactagacatccatagaggatcttttgtaggcaggtagaaaaatgacttgaattcagagaagtttgtggtgaaaaaatacatatatatctgcattattgtagtatatagtttttaagaccatgagaattaggtgtgaataaagctgatgtcatgagttttattagtatatggccaagatagggttttctattatattctgggggtcaactgattagcttcagggctactaatccaagatagccatgtagagcaagtatgtgttaactctacaggtgagctggtgagggaagggggtggatcagcttaagccagcctcactgccaggaaagcagccttgggtgttgagtcagctctgctatcatcctttctgtgaaggggaagacatcctgattgctattatagatatgaagataaactcacctggataatgtcatttcaccatgtaggcactcctcatccacatgttgagacatgggcatacacgtgcaattgaattcatttcttgtttttcttgtgatacattcacctcaaggtgagacttaggtagagttgaccaatgggctggagatcatgtgctgaggaaaccctgagaacacagctgctctcaacttgtcataaggtgtttctttccaaggagccccaaatggattgtgctatactcatggcattatggttggtaatggaggtgcaaagaagtagaagacttggagagttcccttaaggaacttatctggtggacttacatgaaaattcaaatagtaatgcaagatggaaggtgccagacaacagaggcatgaaatagttcatatgagtcatgagaaattctgagtgaaatcctaggtgccataaagtcaggaaaggctcattcacataggagattgggcttgagctgacctttgaggagtgggaagacttaaataagtaaagaggaagagggcttcctagtgtggttgtgcaggttgtacataaacaactctaaacagcaccataaatgtcacaatccatgtgtatggccccaagatggaaagacactccaggagggaaaaaaagcatggaaaaaaacaaggagatagagttacataatacatggaaagtttatttggctgatgctagtcaaatatccatctacttatttaggaaatatttatcgtctggcatcattgagatcacactgaacagagtggaagattcatttaggaaagcagtgacaaaaatgtgtgggctgttgctattcaatgtgaggccttgaatgtcaaaccaaggacttaggactttgccccatgggcaatcaggaggtatagaaggttttggatgagaggttgatgttttaaaaatagtgttctagaaggatatcttggcaacaatgtgccagatggcttgggttatggggtgacttgtggtggggaagtgaaggaaaaccataaaccaggaaaagagtggagagtgttaaaggtaattcagtatgggttaacagaaagacatggagtcattttcaaacatacagagtcgactgtacattcaccaattaggtgcttggtaaatgcttactatgtccgtggttctctaatacatgtaaaagggagacagaaaaaaattcaacagtaataatcccaggtatatctgtgaatataaaacacatatccacattgcaagtcagcctgtcaataagggaggacagaacatagataagcagaatgagatatagtgaataaatttaataactgccaactagttagcatttatggagctccttaatggcttaaagcatgactgtatcacatgagttttttttactacaaccctatgaaattagtgttatcagccatctttcaatttcaatgaggaaaccaagatgccgagagactgagtgacctattgtgctacctagccttgcactgtgccaagctcagtatctctacaatacataggtaggggaacctctagttactgagccagctttgtcagctgtggcgagggtcatacctgatgcagccatgagtgcatcccttcctcaaggggcatacaagaccctgccgagctaagacatccagtatggggtctttgtcactgccaagaatgcccctggccataataactgtccttgagtagcaagaatagcagagtccctactccctgctcctggatgagttaggtcaacagggactccaccaactctccatggcactggtccatcagagctgcctcatgcctatttccatgcctaggttatgctgtaggaagcattggcatatccaaggctagatctttcatttccttcccctgcgagtcttctgtaattgcttggaactctgggaagtccagcttttggcttagtagagggctgttctttcactgagtcagggccctttcatgatggaacctcttctgattatgaaggtaatgttagagtagttggtgggtatatttgctagggctgccataacaaaacaccacagactactggcttaaacagaaatttactttctcatagttctggaggctgggagtcctagagccaaggtgttggcaggtttgttttgtcctgagcctctctccttggcttgcagatggcccccttcttgctgtgtcctcccatgttctttttctgtgtgcatgcatcttttgtgtacaagtttacttttcttgtaataataccagtaaggttggattagggcccaccctattgacctgatttttaaaccacatcacctctttaaaaggccctgtctccaaatatagtgggagttatggccttggggtgaattttggtgggagacacaattccgatcataatcctggggaagctcttcccactccacatttcattgtcctgttgtccttgctctcctaattctacttcccttccctcaccttttctggaagtctatttgagcctggatccagaagatgcaagggagagatctgaagtgttgcttaaaaaaaccgcgacagcccacttatgcttaggagctttttctgggcacctttcagcagcaacacaccctcacagttggacttcctgtggtgaaggaaattttctaatttcttttattaggctaattaggaaaagaaaaacaatcattttttctcaaatcagatactataactgggacacaatgattattaatcatcatcagctgcaattgaagtccatttggtcattcaacaaacattccccaaccccattcccacctttccaattatgcaacccctcagttaaaatcgccatctccagaaggctctccctaactaatttggcccacaatggtaaaccccttttcaaaatttgtgtaacatttgacatctgtattacttatttggtatgtattatagtgtaccttaaaatctttaatgtacacatatacataacaaaataagttccttaaggacaaaagaccacactttatataatttttgtttgctggaatttaacagagagtaggcacagaaaaagttctcaaatgtttgctgaatgattaaatgattaaataatttgaggatgggtattttttgggcccataaatttagaaattactgttaaataacattatatagatttcgtagattacaaattttgaaaaaattgaacagcaataaaatacattttaaattcaaacaacatatggacataccttggagatattgcaggtttgatttcagaccactgcaataaagtgaatgacaataaagtaaatcacacaaatttttgtttcccagtgcatataaaagttatgtttacactatattgtagtctattaagtgtgcaataacatcgtgtcaaaaaaacatatctacataccttaaataagaaatatattgctaacaatcatctgagccttcagaaagtcttaatctttagctagtggagggtcttgcctcaatgttgatggctgttgactgatctgagtagtggttgctgaaggttgggatgactgtggcagtgtcttaaaacgtcttagtgtgtttttcttgctataaaagaatacctgaggctggatattttataaagaaaagctttttatttgccatacagttctgcaatctatacaagaagcatggcattggcgtctgcctctggtgagggcgtcaagctgctcccactcatggtggaaggcgaaggggagcctgccacatggtgagagcaggaagcaagagagtggggagggaggtaccaggctcttaaaaattctagacagaactaatagagcaagaatggagaactcatcatcattaggatggcaccaggcatcaagctattcatgggagatccactcccatgacccagacacctcccattaggccccaccttcaaccctagagatccaatttcaacatgagatttggagggtcaaatttccaaactatagcaataagagaagaatgatgcttgctgcagccattgactctttcgtgaaagatttctctatagcatgtaatgctgtttggtagcattttaccaacagtagaactttttttgaaactgaagtcaatcctctcaaaccctgctgctcttctatcaactaagtttatgtaattttctaaattttttgttgtcatttcaacaacattcacagcatctttacaggagtagatttcatctcaaaaagtaaaaagcaactcctcatcaatgaaaattttatcatgagattgcagcaattcagtcacatcttcaggctttatttctatttttagttctcttgctgttttcaccccatctgcagttacttcctccactgaagtcttgaaccccctcaaagtcattcatgagggttggagtcaactttgttcaaatgtctgttaatattgatatttttaccacttcccatgaatcatgaatgttcttaatggcatctagaatggtgaatcctattcagaaagttttctgtttactttgcctagatccattagaggaatcactatggcagctatagccttatgaagtacatttcttaagtaataagacttgaaagttgaaattgctccttaatccatgggctacagaatggatgctgtgttatcaggcatgaaaacaacattaatttccttgtgcatgttcatgagagctcttggatgaccaagtgcattatcagtattttgaaaggaatctttttttttttttttttttgagaagcagatctcaacagtgggcttaaaatattaaggaaaccatgctgtaaacagatgttctgtcatccaggctttgttgtttcatttatagagcacaagcagagtagatttaacataactcctaagggccctaggatttttggaatggccaatgaacattggctttaacttaaagtcaccagttgcattaacctcctaacaagagagttagcctgttctttgagtctttgaagccaaacgtcgtcttctctacttacaattttctcgtctctagttatgaaagtcctagatggcagcttcttgcaatatgaagctgtttcatctacattgaaaatctgttgtttagtgtacccgtctttatcaattatcttaatcttctggaaaccttgctgtaacttctgtatctgcacttgctacttcaccttgcactttcatgtatggaaacggcttctttccttcaacctcgtggaccaagctctgctagtttccaacttctgcagctttctcacctttattagccttcacagaattgaggagacttaggttcttgctctggattaggctttggcttaaagggatgttgtgactggtttgatcttccatccagaccactcagacgttctctgtatcagcaaaaggttatttagctttcttattcatgtgttcactggagttgcacttttaatttccttcgacaactttttcttgcactcacaatttggccatttggtgtaagaggcttagtttttagtctatctcagccttcgccatgccttcctcactaagcttaatcatttctagcttttgatttaaagtcagagaagtgtgactcttcctttcacttgaacacttagaggccattttagggttattaactggcccaatttcaatattgttgtgtctcaggggatagggaggccaaaaaagagggacagaaatgggggaatgaatggcaggtcaatggtgcagtcataacacacaacatttatcaattaagcataccaacttacataaacatgacttatggtaccccacaacaattataatagtaacgtcaaagattgctgatcacaaatcaccatgacagatataataataatgaaaaattttgaaatattgcaagaattatcaaaatgtgacacagaaacacgaagcgagcatgtgctgttggaaaaatagcatccatagtcttattagactcagggttgtaaaaaatgcaacatttgtgaagtgcagtaaagtacaataaaacgaagtgcagtaaagtacagtaaaatgaggtatgcctgtagaactaatctcgtgtcttagatgtgtgaaaaaaagaaaagaacactaaagccaggttagagagttctgctttctgctgtgcctttcatggacttttgaaccttgggaagttactcagcctctctcagggcctttcaccatttacaaggtgaggccatggactctcagatgacaactagatttaccttgcatgcagttttcagtgtatggacatggtttactggagaaagattctgagaccatgtccaaacccatctatgaaaagtacctggaattgttagtcatgtcagcaaatgcagaggaggaagtataggtagtgtaagtatagacgttctctgaggtccctccgagcagtaaagctctatgaatttatgattcactttctctttcatgaagagaaagcacttcagaaacttatggggctctgtagtcatcaccaagaacatttgctttcattgtactgttaagtaggagtgctcatcagcagagattctggtcaaccaaatgctgggttagtgtagagtatgctacttgatctaaattcaggaaaacatgcccagggcgtaggacttccatactacacaaattttcttaattgcattggtgtaaaatgtgcaattaaaagggtaatgagagtggttatctctaggtaatgattgtgggtaatttttgttttcccgtttatgcttttctgtacttctaaatgttcatatataacttttatagttagaagaaacaaatcctataaaaaagaatgatagatactctagcaagatgaaagaacaaggaagaatttcaaaattcagttcatttcagtgaacatttatccatttcattcaataaatatttatttaccacttacaatgttacaggtactgcaggggttaccagtaactgattcaagaaggagagctgttcacagagcaagatgtttcacagaagagaaagctattgaactaggtcttataggaagagttatcaattgacagaatatgaaaatggggcatcttgggaagaggaaatggtacctgtatctggaaaatgtaatgcattatcaaaggaccgtgaatgtttctgagagggatcctccttaggagtggggggagataaggctcggtaaatggatgaggcccagactgttgtgtcatggtgtctaactagtgggcaaagtagagccactgcagggttctaagcagaggaaggccaccatgagaacagtgtgttgggaacactgatgttggcttcaggagggtcagagggaattcactgggcagcacagtggttcagggtaagggaatgctgtataagcaccaggcttcttcccaggtgttcttaattattacaaattaggaagattaaggtttaaattgtgtcactaacatgcttattcagtgggtgaggctacaggttgctaaacttgttagaattgtgatacaataatctcattgttttagtgtcatgtcttttccacccacctctgctttctctttctaaccgtctcccaccccatgttattggcatttagttcatattcattttagtattaaagtgaagtaattatttctgtattgtgaaattggcatttgagatcattggaaatattctttaatgctgtaagctagagttttaaaaaataggattagttaagtcatattttttaaaagcgaaaaaaattacccagaagctattgaagatgatgagataatgagatgaagaagttgagatggactgtgtgtctcttgagtcaatgtcgataacctttggaacctgtcctaagtgagaacctcgattgccctactgcaaatgcacgtgttcagctgctgattcaggactgatcactgggggtgcctcagaactttccattttcttagattcgtcagcaaactcacactcagggaccttatgagaccaagtcagagtaaatgtccagggtttacagagtggatacagtggctctgtttctcaagaaggactctgtataattaaattatcattcttctattaaaaaattgaaattctttctcccaggagctcattgccagtgccttctctgtagtcttatagtcaattcaaaaatatatcacttctggaagatgtgagcttgaagtgtgaatgctatcacatgaatcttctttttatcatagaaaaggcttttaggtggggtgttgatgtcaagattaactcagagaaaattggctgcagttagggctgaatgatagtgatcattccaaaactcattaggagtctaaaaagtgaatatttagactttgaccaaaacccatttgtcctagagtgaaatatggtagcgagagaaagacagccctgcaaccccgaagtgtaggcgggcctttctttaggaaccaggcatgttcttgaaatcttgtgtgtcaatcagctttttgtaaatggaatccttttttctccttcattaactttccctgtaatttcagcagtgtttaacattcattactgattgatcttgagttggcagttaactgctaacattcagatttggattttagtgcttctttcttgattttcttgcctttttttctttgctcactttctttcagcaactacttaaggagtaaatactatgtctcaggcccagtgatagggactgggaatataagtaagaatgacaggtaaacaattaccgtaggaaatggtaaatgcaaatcctaggagtacagagaagctgtggtagcacggagtccctctgtctggggagggcttcccagggcaggggttactgaaggatctgaagatgtgaggaggtgcttgcttgggtgatgcccatccaaggaagaccaggatcagaggcaggtttgggattaactaactggaaggactttggtgttgaggagtttcagtctcaggacaagcagtgaagcagctgatgatctttgcttagccttctacatggagtgagttgtggggaaaagttgtttgcaacatgtatttctctaatggccagggaggggttatttcactattatttctctccaacttttctatcaaatacacttgtggagtttctgtagtgtgaattgtcttacttcaatctgtaagttcaatctatattcatgaagtaggagggcacccctaaataagattgagagggaaaaaacatgaatattttcagttttagtgggaactctcatatttgacttagtaacattaaaaatgattatatataaattacaaattttttatggtaaaggacaccataagtaatgtcaacaaatgattaatacactgagaaaaatgacacgtaaaaaaaattctaatataagtatatataaagagcctctataaatttataagaaaaagacaacatatagaaatatggacaaaggaagagagtaagcgattcaaaggaaaggcaaaccatatggccaataaacacctgaaatgatgctaaaactcagaaaaatgcaaattaaagcaataaatcggaccaattctttatccatcagattggctaacatgagtaggaagattagtggaatgttgcctacctgtggttctgtgcatctgtgtgggtctactttaatgagtttagatctaggtgcttgtcctggaggcacattcacagtgtgttttttaaataagaaaagcaagttacagagtaatgtgtatagtatgatcccattcaaaaaaatagcaaaatgctatgtgtaagtttgaatgtgcatgaagataggtgggaagaaaacacatcgggccataagcacttaccacagcaggatgggaatggggggagggtgggggcaagtaactttttctatatacatctttgtatgcagttgtatacatattgcctttgtaatttaatgtacaaagacaaaataagtacctagaaattaagaacagattagtacactttttctgctactgtcttgccatagtgttgttcaaaccagctagaaaacaattctgtggtgccaggtgagatgaactctccacctcttcctgagggctttgtcttcatgcatgggacaaagcagtgtaattaacatgcccccccaccccgccttaaaacctaatattcattcatctcttactttggttattatttaaaaagaaaacatttgtcaattacttcacactgacaagcaccatcccactgagggggcaggcaggaggtccatctcaccacccagctgtattgcaacaacgccctctccatctgggaatacggcccaggcactcctctggaatcctgaacacactccaggcacctctcttcttactgaacaccacctatgcttggagcaccatgtgagaggacacctctggtatcaggcagcttcagatgtattcagagagattgaaaactgcaaggattcaaggcataacaaatgatacacagacaagaaaaaaagacatttagagtgggggatagggcctgaaggcttgaatggtcctacaagactttctcaaaagtcgtcaccctgggacctgaaacattagagctctttccagagtaagtctattctcagccagaggtctccaacagaggctgtccatgtgtactggtttcaagttctgcttacctcccaagtgttgttttttctgaccctgacctaattcctcccaggccaggctggccagcaccttcttaaattgctctcaggcagctggaaggcctggctggcaggagccctgggtttttcaccctcagccccagggctctttgaaggcctactctccaagaacaaacaaacctggcctgacgctgcatagctgcagaataggggagctttctcggcctggtgcccagggtggccgagctgccagccaggtgcatgatcctcagttaattaggtaactataggtagtcctgcagcccaggctgtgtgctgattagtctgggctgttgttggagacctctgagaatagacttactctggaaagagctctgatgtttcaggtccagggtgatgacttttgagaaagtcttgtaggaccattcaaaccttcaggctctatccccctctctaaatgtcttttttcttgcctgtatacatctgctatgccttgaatccttgcagttttcagtctctctgaatatatcttaagttgcctgataccagaggtgtcctctcacagtgtgctcccccagcatcgtgctctgagcataggtggtgttcagcaagaagaaaggtgcctggagtgtgtttaggattccagaggagtgcctgggccgtattcccagaaggagagggcgttgttgcagtatggctgggtggtgagataggcctcctgcctgccccctcagtgggatggtgcttgtcagtgtgaagtaaaccctggagcacctgagggaggaagaggaggagatagatcttcagcttccagggattagactgaaagctcaactggcaaaatgcccattttattccctcattgcaagctgaaagtagagagctgaggaaccccgggcttgaccacttttttgcattgacagatcctttgtgggagacacatgatccacatgggcattcctagatccctttgaagactccataagcccagggagatcagatttacctcaggtttcaagtagatctcaagatcccactggaactcagattttcaggggagttcagaattagggcacgaagtgcaggagatggtatcaacagcaacaaatctgtctgatattctaaaagagttcatcccagtgtagccccaaagacttcagactgaaccagattcaccttgaattgaataagctgatgcaatattggcagctacacattcttcatatgacacctcttttctcaacttctcttcaccctgtagtctccacagagatattcctgagggatagcaagagtggggagctaacctgtttctttgcactgaatgagcaatgcttgtgcctttcctcttttcttgtatctgtacatttccagaggagccagtttatagagggtatagagtaacccaagaatacaggtttgggagtaagggagctggcttttattccaagtgctgccactggctctctgtgtcatcctggtcaaggcatggggtgggagcaggtgttgaaaggagcctgctgctggggattggctggcccccaaggagcttatgcccctcttgctaggatgctggggatcaggtcagtaacacctgtatttacagatgtgggctttgttacatatttaatatttaatttaaaaagaattaatgacagtcatagcccatatataacccacttcctgatgtgatttgtttggcccagttttacaaagttgtcctgtcagaggaatttcatttataaagttccttattgctgagcctctgtgtgttccagttatgagtcacatgtgtcaacaccgtggaaatgaaatttgtaccccctggacccatgcagattgatttgattctgggctaaatggaaatagaacctgtacaagtcaaatgtttctggagcatctgccatctacagggcacttggaggaaacataaagacattcaagacacaatccgtgtattcaaagaatgcacagtccagccaacaatgttttaaagcttccagtagtttcctaaaaaataccatagtctttttgagtttggagaatattattactgttgtcaattactttttattagcaccctgtatgatataggtactatcttaggttggtttccctggaagtcagctctgcaaaagagaattgcaagcagaacgtctttcgaagtgtgctttgggaagatacacctgaggatgcaaaaaagccaaagttcaacagaggaaaggctgactcgcaccaccagaactggatgtcccttcagaggtgtctctaatcgaggcaaggggcagtttccaaggaagggtgcagcagctggggaataagagtgtctgccctgaaagcagaacctgagtataatatcatggtatccactccaggcattcaaattcattcttatcaccatagctaatacttaccgaatgctttctgcttgccatagcttgagcgagtgttttagctgcactgtttccgattcatgcaatgtagagatgaggcagttaaggggcagagaagtgaactgcacaatgaataccatggtaggcagagaggtggagaggggaattattaataactgtcagactacacttttttatttttttgagatggaatcttgctctgtcacccaggctggagtgcagtgccaccatctcagctcactgcaacctccacctcccaggttgaagcgattctcatgctttagcctcctgagtagctgggaatataggcgcctgccaccacgcccggctcagttttgtatttttggtagagacagggtttcaccaagttggccatactggttttgaaatcctgacctcaagtaatctgcctgccttggcctcccaaagtgttgggattacaggcatgagtcattgtgcctggcctcaaactgtacttcacatgtaattttcaaagcgctatcccatgataggaattatcattcccattgtacaaattgagaaactaaagcatggagaggttaagggatttacccgatgtcacagaacaaagaagaaagaggtaaggccagggttttcctattagcctatgatgtctcacagagataacctgtccaggtagatacccagttttggctggagaaggcatcacagaccttgggtaattgatggcccaccagtttgcacccctttccattaatgtggaccgatcatgccctttgttgtgggtcagtgagcgtggtctttgaagttaggcagatgtgggtttgaattctagctctcattttatgacttacgtgtcagttcacacctctaagctcactttgctcttctttaaaatgggggtgataatgatgacttcattgggtcattatgaggattaaaagaaatcaggtatgagaaatctctcagcacattctcccctccctggcaaaagggttcaaggctgcacaaagattatctaagggcagatactctgaacatagccatagtttattgattcagcgttttgtcatttgcttccctctctcaagaggcaagagagaaagcgagactgtcttccatgcagtttgctcagaattctaacactagcctgttagtctaatcataacacatttcttcttggaaacaaacatagcaacagcaattatatcttacttttaatgtctaattggctgtaaacttgcttttactaagttatttccatcgaacatgtagagcattgtgcagtttgcttatcttgatgtcctcctcttgcagtccccatcttggctttattcgggaggccaattatgtgtatgctagccttgtgggtgccctagaaactccagcaaaggccagtgacagtgttgtgagccttctgctcctcattatccacagaggcaggagcctatcagagcctccaaccttgaatttttgtgtgagttctgcttctgttctcctactccaggtatgtcccctcacctggcttctggagtaacccatccctgctctctgaacccccacttcgctgtgccttcctctgcttctaaccctgcctctacgatgggctctctctccttttcctcataagccgatcattcttttcctgcaagaagtcccacagggaagccatgccatcctagccagacttggttatggtatgacctggcgttcagaggacacaccccagcacctctacactggctttcagccagatatgtcttcaccgcttgttgagacagaacagctttcttctacctttatgctatgaagcagcctttccaggagccctactggggccagagcccaagtgggaagatcctcccttaagctttcccctctgtttttccaactcctgaaacttacatccttctgcaggcttcaggactcagtgtaggtgtgtctgatgcccggtcatcctagagaaggggttgtgggaggggctgtacctgttgctatggcagcaaccagttgagatcatgaacccatttgattcagaggcaattgcaaggtgaatcaatctccttgtcacccactcctcttctcctccctctccatctctccccacagccttctgtcatctttcctcctccccactcaacctcaagctttctccttccccagttctctctctctctctttttttactcctagttatgatacatcaatgtagcagctaaagctactcatggtagacttcttatttatattatactttagcaagcatcacctaaagggcttattaaaacacagattgctgagcttcctctagagttctgatctggactctgcaccaggacccaagaaagtgcatttctgacaaggtcccaaatgatgctgacactgcaggtccaggggccacactctgagaacaactgcgctagactatgtttacccagtttgatttggttgtggctggaatattcctctgcattttgattctaaagtatttgattagctcattcatccattcatagaacagatgtttattgagcatctattcagtgtgaaacactgtactaggtactagctacctagagaaacataaaaccttgccctctaagagttcacagatctgtacaaaagacacagtaaataagtaattattatatggggtgataagtattgtaataacctgcaaataataagagatttaaaagtatacaaccaactccttgctcgtggcaagtaaaatatttagatgataggaatataaataataatgacctattcatttatttttctttctttgccaagaattgcctgaagggaactgagcttaacctatttaaataataatattaacatctaatgtttgtggagcatttactatgtttcagatactgtaccacatacaaggcatattggttaagagtgctgcggtcagactgctagggatatagtcctgacttgtcattatctgtgcaacctcaggcaagttacttaaccactctgtgcctcagtttcctcatcagaggaaaaggttatagtactagtttctgcttcagcagattactgagaagatgaaatgtgataatgtagtcaaaacatatatagtaattactccaaaacacgttgactcttattaccaacatattttgacctgaggctgaatatcacagaattggcctagagaaattgatatcttccagactaaataaatctccaggattttgtcaagagaatggatgggggctggacctcaatgtggggattagagaattccaaaacaggcctgaaaactccttggagcaccagtcagaggaagcagccctacttggctgtcggagaatcagtgcaccccaatggaatataagaaaggccctgatggatggccaggatttggaccatgaaacttgttttggaggagggagggggattgtcaggactgaggctttacagtctctggttgacacagctgaggaaggcagaaccctcaggctggggtgtgagagtttcaagcttagccttgaccagtcttgccatctagagaaccagggtcactttcaggcccaaatgccacggggctggtgctgtcagcattatcagagcgtttcctagcaatgcccatcagcaaagaggctgtgttttctgaaccttctccaaagaggctgccctctcccctcttcgatatgcacccccatccctgagagaagtgatttcctcttgttatttggaaatcagggagagagtttcccaatctttgtctggggctctacagggaccacagtccacattcatgttgagtcaggtctctcttttctgtctcttagacccagcttcacagctgagactgtagctatatgagaaagcagaatctaccagttttgttttaatcctttcctgagctcatcagagataagagtgatagaaactttcttcttacagagaggattagaagttctttgtggcaagatatacctgggaaggggttattaagtgatcatccctgataaagcccctctaatcatctactagttttgctattttagtggtgggaaaaaaaacacaaaaccctaggcacttaactcactcttggggaaatctttctaatcccttcctccctccctccctccttccctccttccctccctccctccctccctcccttcctcctttccttcctgccttccttccttcctttctgtgtgtctttgtgtctttctgtctttcatcctttctgcttgtctcagatttaatcggagccatacattccgcttattcacttatttgtttgttcattcaacaaacacttgctgagcacctactgagagctaagttgggttctgggccagaaacagacaaagcaaacctgcttcttgttcttgagggtgtcaaatattgtagaagtgaacaacataccagcccacaatgattatgttgcagttaagtggtatggtggaattcagtgtagggcataagggagtgactgactctgggaaggttttttagtgaaggtaacattcagtcagggattgagtggaggcttttcaggtggaaaaggtaggaaaggcattataggcagtggggacaacatgagcaatagtgtagacataggaaagaatgtggcatagaattgcaagaagctggatgtggctgtgtgacttggtatacaggtaggcagatgctgtgagagacagatgagctagagagggtaggttgggtcagtcatggtaggggattggcatgggcaaattcccatttcaaggtattaagcaggggagagacagggcaagatgtgttggttagaaatgacaactcttccctgctctgaagaatgaaaccagctgtgcctgggaatcacttgccccactttacaagatctccctggcaacagaatggctgttgtacaactagccagggaatttgctgtgacagtcttccaaccttatctgacatccagagcagggaaggaattgccaagttagggtatagatatcaaaggaattgaagcaacacaacattggaatagtattacaatatgaaattagaaactattttctctgctggcattgttgtaaataccagcatccatcactcccttctcaaatatattgtaagttaaaacattgctatttttatctctaacccccttgccctctaacccaggcaatacaatatagcttcttgaggagaggcccaagctgggtgtggattccgaatcttcacccagcttcacatgcttattgtgggagcttgggcacatcccctgtgccttctgagcctgggttgtgttgttattgttgcttgttggtttgtgatatggtttggctgtgtccccgcccaaaatctcatcttgagttgtaatccctataatcctcacaatctccatgtgtcaagggagagaccacgtagaggtgattgactcatgggggcagtttcccccatgctgttctcatgatagtgagtgaattctcacaagatctggtggttttataagtgtttggtagttcctcctgcattcattctccatcctccctccttgtgaagaaggtgccttgcttccccttctaccatgattgtaagtttcctgaggcttccccagccatgctgaactgtgagtcagttaaacctctttccttataaattgcctagccttgggcagttctttatagcagtgtgaaaacaaaccaatacagtttgttacatgtacaattgcaatagcacctctcttgcatgtggttgtgaagattaatgtatgctatgcacctggtccaatgtccagcttagagtagagtagatgcctttttttttttttgagatggagtctcgctatgtctcccaggctggagtgcattggcatgatcttggctcactgcaagctccgctgaccaggttcacgccattctcctgcgtcagcctcccaagtagctgggactacaggtgcctgccaccatgcccggctaattttttcgtattttcagtagagatggggtttcaccgtgttagccaggatggtctcgatctcctgaccttgtgatccacccaccttggcctaccaaagtgctgggattacaggtgtgagccaccacgcccagccgagtagatgcttaacaagtggaaaccattattatttttctccccttcgatacatggagccttagggtctaagtgacaggaaaatgttcagataaagatgttttaattatgtcttcttagtacttccagaaagaggtctgcatgggtttaggtcagctctgccttccgacagcttacgtgcattcttgtgttgctctcccatcttcactgctcttcctacattccaccctaatgaacggcagagagagctatgcaaagtggtcaaagtaaaaagggattctttccgatgtttcccagattggagaaacaatgaacatgattactttattatctctgttttgttttaatcttgttgtgccccaaactaatggggatgctcatttggaatgagctttgtgtatctttgggcaaagaggaaaaccaagatgaatttctaggagggcagcaggagagtgaataagagagtacaaatcatcacaaatcaagagatgagtaaagagaagggggttgggaatggcagaattggaacctgagagttagagtccatgagagagaggagaagcaaaatgagaaatatggagtctgagtgggaaggaaccccacatctgttgtctgatacaggcacctactcaagggaggaattcggcatcagtgtccctcacagatggttgcctgacacagtgatttctataaataacaattatatggcactacgggaagtggatgaggctacttacaaatggagctgaccagcctggggactgactgtccccaaggtctgtcaaagaggtgatgggaagatattttgtgcacatctgtagctcagtgtgctatgagaaactgacctcatagggccatcttggagtgactcacccatgtaccttcaggccttcaggtgattaataggcatgtaggactgacgtttcattatcactgcatcaacgctgatgtagacttattgagcatgtcttccattgatgctgtcttgggttctggagatacaaagacttacaagccatggttccttgctttcaacctgtttttgttaaggaataggagtgtttcctgtggccacagaataaacgaaactaactgtcctggggcttcttcaggaaaccagtggggctaaccagacttacatagtgtttgatacacaatcattaattaaaacagagatgttcaatgataaattaattcgccttctgctcagaattcattgaggagggaagaatggaagccaagaaaaatgattatctgaagcttttttcttgagcgtctgcccttgtaggctgtgctgaatatttgagtgagctaagtgtacttgctgtatgtcaacagagatgacattttacaggtgatatatttatttccagagaaggaaacttatataggcttgtgaagcagaagaatgccagcaggtttctaatctcctattagtaaacaacattatcgagaatctcctgtttgtggagtaatattctaggcatttgtagagtgaacacagaaataaagatgcagttctgtctttaagaaacattcagccctaatgggaatggaggaccaatatgtaaaagagacagaacacatataaagaaggtccataaataagtgcaaataaatgcctgagtgcagcacttaatgttctgttttctattataggtatttgtactcacgacttagccttcttatggataccaaagcccttgagaactgttttcctttctcattcatcttgtgcagagtacacactcaaaagtgttgaatgaatatgtatgctactgtgaggtgtgcctaattgctgggggaattctggagtgaagtagaatgacatgtttaggggaaaccttatagcggcttagcagtgttttcaagtatgagaggacttgtaattggtggagtaaggggacaggagggagaagaaagaaggaagagttcacggggactgagcaaatccaaacaatttatgccaccattcagggtcctccatgatctgatccttcaggtcttaccttgccttgcttgctgccaccaaaggcagcccactgtggccttagcattcccacctctttctctctccttggaatgtcttcctctgttgattggccatctgaatccaccttccacttcatgtctgggtgaaagtagagtctcaggaagccttacatgacatctctatccttgctcctatcttcattaaatggcagtgtttgcaggtctgatttcagtggtcttaaccttcagaggaaacgagagacaatcatggtcttcaacctcgggtagctttcaaatgagatcatgaggcaacactaattttttgtttttttttttttgttttttttttttttttgagacagagtctcgctctgtcacccaggctggagtgtagtggtgtgatctcggcttactgcaacctccgtctcctgggttcaagcgattcttctgcctcagcctcctgagtagctgggactacaggcatgcgtcaccacacccagctaatttttgtatttttagtagagacggggtttcaccatcttggccaggctggtcttgaactcctgaccttgtgatccgcttgcctctgcttcccaaagtgctgggattacaggcgtgagccaccgcgcctggcctggggcaacactaattatatacaaaataataagagggagcagggctgtatataattaggtgctaaacagagtagacagaacagaagaactgtgcagagttgattggaggtcagaagtcctgcattctggttctacttccatacccaataagtggagtaccttttggcagtcacttggcttttgaaccttggttcttctgtaaaatgaggggtttgtgcaagatgctgtgattccttccagctctagaatctgcaagatgataaaggttagagtactcatattagactgagtgggaaatagtgatttgttagtaagaggggagaggggaacatcaggaaaagcaataaatgatggcgaccagaaggattgattcctgacaaccataggacaaagtggagaatcagagagggactggttgaagagcggttaccttggtattatccagcatgttctttctggaataggatgggcactgcacaaaacgttcacaatagaggatatatgaagcctcctgtactcttttgcgtttctgatactcacctcccctcttgttttcagagccctttctggtgcttgccactctttaaagaatacaaatctctcatcagcaagccctgtagaaggggcaaaggggtgatgcactttagctcatcaccactgggcacgttctctttaatcctctcttaaattcacctgctttggctgatctgcatacagtgggagtggtgtcagatcaacacactggccttttcccaaagcaaagcgggatcccagcctggatggcccagcacagggtcagctgcctccatcctggccccccagagcatctgcctccccagcaccctgggctgcagttgcagagggccttctttttaatgtttttctaataatcacttttttcaaaccctaaaacaacactttgttattgcatgatagttgcaaaaatataaaaataatttttaagaataactcatttctaccccctcactccccccacaggttatcatcactattattaataacatttttcactgttttgactaaaaaaggttttcttttaaaattcacccatgacccagaactatttaaataaactaattttattttggagaaagaccctaaaacttttattatagagattttcagtcatgcacaaaagtagagagaataaaatattaaaccctatgtaacccacatcagccccagcagttacaagaagaccttaaagtctttagaggatctggcatctccctgttgggcttctgtgtcagagttcagaaagggagaggggagggacaggataaatatcacatgacatcaatgttggaattactaggatttaagcagagggattttaagcacagcaggaccctgagccctgcccatattggaggtgcccacttttgcagaccctgccacggcagccttcgtagtcctatgtggcaccgctctttgctcttgaattgtcctcccaagagcgtggatgggttttcactgacacacgggtacctgcctgcccagtgccagtggtgaggactgcccacatctggggtgggccatgccagcccttgcagctgaccggccagagctcctgaccctggtctcggtagcatcgtgtggctgcttgtaggttgggtggaggagtgtttctttctgtgctcctcctctttgccaaacactctgctgcattttcccactggcaaaagaaggggaagaataggtggtgaaatgtggttctggactgaggcactgcttcatcctcagtgacaatcactgacattcttggcagcggggagatggtggctgcatcaagtccagaggattctgaatgacctgaatgtgtgggaagccttgcttactcataacggcccctggctaagtcagatgctgcctccagagattgtttgtgtggggagacttagtatgtttattaaatatactcagggctccaagttacagtgaaacgccctgctcctgggcctgacaggctcagcctcctggctgggtggcagcaggtgcctatgtttcacttggagctctaggtcctcattctttcccctgctccccaacctttgcctcttgcctgggggctgagaagacagctttcatttttctggctgtaagatcctagtggtgactgtcctatctgtcttttgttctgccctagaaggtagtaatagtatgggtaggattgcttttaagagttctggaactaaagcagacatgaagagtcaagggtttgcaagaagttgacccattttggttctagattgtggccccagatctgccgataagttgcttggatcctcagggaagtcgctttgcttccttggggctcagtttcctctcctatggaatgatgagttggatgacttgttctcatcatcctcttccaagagtatgactggatttcctagtctgcaggaaacccgttataggcatttaattgcccagtgatgtgtggggtatgctgtacattgtatccttttcctaaaatgtgggtgtggtcagaggaatcataccttggctttgaggtagaaacaccatccaactggtgtgactcaggggaggggtgttgccagctttgtatggtgggtcaaaaccctgatagaatgccttaaatcaaattccctagaaactgattgtgaaactgagcttcttgtggcagtgttttaatgagggactgctcttaggagttacctaaaggtatgtgagggaagcaggataggtcaagggaaaaactaggcaaagcctcagcctggttccatgggcagcccaaagtgtgaattccaccacagcaattgtcttacccagtggcaaaagggccgggccattgataactcctacattaggtagttatctgttacagccccccatcatcaccagcaggggcaggaataacattccaggtgaagctggtctgtcaggcaagggcaagcatctgaaaagcgtacaggagcaaggcaggtgtgagttattagcagccaacagttacatagcagctgggggatgagacatgggccagaatgccacagagcctgccacgtccttactggtgacagccgcgcagggaggaaggcaggagtagggtgggagagggctgtcctgggtggctgattcctgtggatggctcagcacatgcaggaaagtgttcagatgggatttccaattaggtcaatctaagtgattgttctaaaagttgggatgatgttacatttggggtgggggatagtgtgcctaggaagggacgtgaggaagaccttaaggttatctagaggctggttgtccagtgatatatattttgacaaaatccggggtacctttatgacttgcatttcagcataacatccacacagagctccagggcgctgctactgcaaggtagtagcagttcattctgagagggcgttccccaccctcttttttcttcttataggtcccccacttcttggcatgtcttcatcttaatctttttctccatctttcttctacctccataattaatcttttcactgcctttctggcttctgctgtctcagcgaaggtagtttcttagactcccgtgttattgttttccctgaaaacttcagcacatccttttctgacttcccggacccatgcaggcccacctgccccagttccctgtgctcccttcatagcactgaccacactccagagttaaagttacatttgtgtgctcacttgcttcatgggtgtttcccccattagatcacaagtttcaaagagctgggactgagactgtcttgctcatcatccttaacacacagaaaattatctgtcacatagtaggtggcccatgaatgtgttgaataaaaaatatggcatttcagctccaagacatggaatccaagtccctcggggtgggacaggagctgtcatacttggtgctggaggaaatgggagcctaggggagggtgtgctggcctgtgaggtgcaggaggccaggtatgtgtctgtgagggaaggtgtgaagtagttgaatcagtccctggcctctttccttccccactcactgctctgtgaattttcctttccctaggagtggtcagcagaggctttggacagatgcttctgcagagatgaatggcctggcttttttgctagcctatgttggctgctccaaccctctcctggcctgagccgaagatctctcctcgagatggagccttgagtccagcagttcttaatcaaaagtaatcttgtcccccagaacatttggcaatttttgattgttgcatctggagaagtactagtggcctctaatgggtagaggacaggaatgctgctaaggcacacacaggagagcccccaccaaacagaactgtctctccacaggtgctggcagtgctgcagtggaggaagccctgcctaggccagccctgatctaaccagcaggtgctgctgacagcctctggagcaggtgttccccagagaccctttgcttctgaaaggaccatggaatcagcatctgccttactcccagccccaacacactcagcctccccactcagtcataggcaattcagcctcccaggttacagctgctctgtgaagagggtgcacagacagggagaatgttttccatggagccctggggaaccctgttagagacctgtctctggggctgggggctgggccctgcctgcatagcttcagctcaggggacccatggggcccctttcctcctgcttgctctatccccatctttctctccaatcctcctcccaccccaccttgcagcatctcccccagtcccctggagattaatgtgataattaccatgtgtgcctgtttacgcagggagtgggtgagctcaccacccccatcagtcaggttcccaaaggaacacattcccacaatgtcaggactggtacccgctgagcactcctgtgcaggtgggctgccgcccccgaactgctttctctgtcatcaccctcgtcgtgcacacgtgtgcatgtgtgtgtcactcaggggatcggcaggtgaggaagatggagagcagccagtgtgccagtctagggaagggctgggtggggagggtgttgggagatgggaggagcatcagtgccccatgtaagaggacactgaccaaagagaagcactctcctatgatgcctgactgatagtaggtgttgcatgagtggtgtgggatggaggggctggcgtcttctgggcagcattctttgcagggagggccctggtttcccttagctgctccacagtagaggtctgggctgtgaaggttctcctggggccagaatcttgattggagtacttagcatggctgtcccgtgttcctgaaggaagagtctctggggaaaatagagtgcaagtcttacatgaaaggagcttgcgagaactgccactctgtcacagaagctgggggggatgctgtagagagagaatgagtgattctccctctcacaggcaaccctcctctcttgcacctcctgctgagacagacacgtgcacaccacgagagagaaaacagtcacaactctgtggttgaactggcagcttcaccccgacttccacttcacgtgctttctgggtacttgctgccttgagttgtcggttgctgctgcttttttaatctcaaaggacgcttgagtcattgtctctcctacactggacaattttgttttaataatgatgaatcagaaggagattgaagccccaactggcatcagaaagaaccatgccattttgaaaaagggaagcatgcattcctttgctagcctgcttcctgccgaggtgtgtccctttgtcctaccgggtgtgtcactgacccgtggacaaacatgcaaggggagtggaagccagttggccaggaagaatgaaacaggagggagaggagcaaggtgtggagaagggtggggcaagcctattaaaaggtgtgtgaataacctacaggagctgtcaagctgctttctccagaagaaccttttaagctgtcagtcatcttcaagaacccccagggccttgctggtgctggtgtcttcccagctatgcttttctccttctagttcccatcctcctcttttttcatccagcaggccccactgtggtggataatgtttgcggcaattcagagaaatctccacagattgagagggggctatgagaatgaattgtatcagtgtatttttaacaggagaatcttcatattagaattgtggacgttttttgattagtcgaccatctatgcatgccaaaccctttgttaggtgccagatacagaaatgagcagacagttaaggtttctgcctgaatataggttgaagcaacaccaaaacatactcacaaaatgctgaatcaaaagacactgctcgtcattggttttttatagaattgagaaacacattccagattctgacccactgtagttcctacatttcaaaggctatgttcttcgatgtgttactagattttctctgaaaatgagggtttcactatgatcaaaagtgtttatgaaatggtggaataaacaaggtaaataatgttctttttttgtggatcttctcacgggctcagaagaaaatataatctgctgtttcccaaatttctttggttacagaagccccttttccacaaaatacactaacttcttacagatctctagcaatgagaacaatgtaattttggacatcctcattacagcatccctggcaagtagtcacccaagtgaaattgctctgagccaccctcaaactgtagctcaattatttaagaacaaaattatcttaaaagtcacaatttcatcattgctattgctgatacctgctaatgtttgttggcaacaaagtcctatctgggtgctgggtgtagactcagtttttgttgccaaggaatgttggggtgctggggggtttggccactggctaagccatagagtgaataaaccctgttaatctggagctttactggtgaaccatcagagctagccagccttacagaaggactgatttgtaatcacaaataaacacagagctagctatacaaatatcattgcaattcacttttcagctcatagggaaggtccatgtcttaacgatctcagagaaaacggcttcctacctcccttaaaaccctcaacaactcttggcatctagttcctttggatctttctactaatattcaggaacagttttctctgaggtctggcccacatcttccctgattgtatttaactgaccagacctgattgaaccaaagagctccatcttacacactgaaattggcaggtccctgcatctgtcccttcccattcagaaagtgttttcttgtttacttttaacttttattctgcttcaattgcaattatctctctctgaatagtgtaggggcaaaaaaaaaaagacacaagtgtggtgaaaggagattgccttagaagctgttttagtggggtgattcctcaaataccccaaaacagaactagcattcaacccagcaatcccattactgggtttgcttacaacccaaaggaatataaatcattcggttataaaaacacatgcatgcatatgctcattgcagcactattcatgatagcaaagacatggaatcaacctaaatgcccatcaatgacagaatggttaaagaatatgcaatacatatacaccatggaatactatgtagccttaaaaaaaatgagaacatgttctttgcaggaacatggatggagctggaggccattatcctcagcaaaccaacacaggaacagacgaccaaatactgcatgttctcacttataggtgggggataaatgatgagaacacatggacatatagagaggaacaacacactggagtcttttggagggtgaagggtgggggaaggaagaggaccaagaaaaaagcagctattgggtactaggcttaatacctgggtgatgaaataatctgtacaacaaacccctctgacatgaatttacctatataacaaacctgcacatgtacccttgaacttaaaataaaagttaagctgttgttaatggatgaatcaactatacagtgatagcttccatgactgataagaggctatattctgtggactggaatatttgaatgggagacagaaatgagataatttggaagaaaacaagagaatgtcacagaagtccacaggaagcatggggacaatgaatcaaaatatgttttcagaatttagtagtgagagggggaaaaggtaaattggagggacaagaaatactttgctatagaaattctgagttctggtcttaattttactaatttagcttgtgagttttaggcatggcatttgactttggccttgtttttccagtgaagtagagataaaatatctgttgtaagtttcaaatgggtcttagagtttgtgtgtgagagagtggagtgggggtcgaagggatttcaaagccctgcatatgtgaaatgcaattcagaaagactatttggaaagacttcgaggtgctgtcaggggaggaagagtcaaagggaagactgagaacccttagttgagtggtacagcttttagagagactcccaagctctatttcaaggttctaataagatatcctgctaagaattgcttctttgtttaagtcatgagatataattcttcctcaatccctgaccattcaagggtcttgcatctgattcatgattcgagaatccggaatatggatttgcaggcattttttaattcactgagtgttaacattagagtgcaagtgatcactcttcaaatctagatttattccttgttctggccagagccttgctggggccaagcctgggccagctctgtgctattgtactatgatggaagaaagcaagctgagcgtgggtcaagggctgagcaagacgcagaggaccctaaaatgtcttccaaataaccctgtcaaggcctttgctagcatccatggaatagattgggcacagcctgcctttgtctttttgagaatttgcccaattttgtgtgcagaggcttagaacccacattaccaaatgctataaaaccagtggttgtttgcgtgaccttggaaaagtatctgacctttctgtattgtcttctcatgtgctaagcaagagtgtgagaatattccaactcagtatattatggtgaggctgatgctgtgttcttcattacgtacatgggagattttgagctaactcacggtaataccaaattgggaatggagtaaggcaatatttaactgtattgcattgtggtttttacatcaccctctgtgcagctgcaagaatgtaagctttacttatggaagatggctttaagtattaaggaaccatttttctttctttcagaccaatgatgccttaggagccacctggaattggctgtacttcatccccctcatcatcattggatccttctttgttctcaacctagtcctgggagtgctttccgggtgagccagatgtttctctcttcttaactcatttgctgactgctaactgtaaactaatgcctcctgactcatggcagattcattcatttaaccttcatttagaagacacttacctagcagttcctctgtgccaaatgctttctagatgctgggaatgcagtagtgaaccatcattctaataatcttgattattctcaggaattaaaaagtcttgatgtcaggcacaacactgaacacagtatgtagtgagagttcatttattcatccatgctttcattcagtaactcagcagtcagagacctatgtcaaacacggtgctggttgttagggaaataaaattgaactagacacaggctgtgcctcaaaagtttcttactctgtagtgttttggggatcaagtctcatatttgtggcttgaattagtttatacaaatctgcaactatttggggtccaataccatggtaagcatcgccaggagcacacaaagtataaggtgtggttcctctccttaggaaacatgttttgccaagaagatgatacacatgaaacagagaataggagttcttttactgacttatacaaggtataatcatttgttttggggaaaggacaaatctatgtaatctgaagtcatcagggatagtttcatcaaggattgagattttgcttggattatgaaatatgtagtaggattacatagactatatgggagtgaacatttcaggaaggggaacatcacaccataagcaaagatgaaaaaatgggacttgtcatggagtgtgaagaaattataatgtaacatcttaggagagctgagacggggatatattttagagattcttatatttttctaagcaaaactgaacttaattttttgtcagagtggcatacgttcttcaaatgaaaatttataaggtggcacttctgtttaaacatggcagattgaactaagttggtcatttcttgaaactccactaacacagaaaataaattttaagaagggcactaggacaaagagaacaagaggaatgacaagagatgaaagatgtcaacaacatttttgaacatagaaaaaattggcaacagacagtgataggaaagctgaagtttaattgtttagggaatgccagtaaaaaagcaaactgattgttcttcggagccctagaaaggctcaggaattggagacaccaggtaggtctgagagctggggtaggcgtggtgctaaaaacaaaaggactgatgcaaagtccttgtaaggaacattagaatccctgccccaccccactataacctccaggcaatgctgacagatatctgcttcacccaactcccatcctagcaaaagttaggagacttaatctctgtagatgtggaatcagagaagcttggaattgtaccatcagatacacctgagggtagtgttgatatgttgtactgaaaacaggagggctaaatgaaagtctacaaactgaatgtgcgtagtccagcccacttctgcttgactcttaaaaacatagcagtctggtaggagttgagaggattcctcttttggggaactgtctgaagagaagggacaaatttatactgatatttgggagagaccagagaaacaggttcctacctcatcacctttggtgagactcactgtattaattacctatggctgctttcaactaattaccatagctccgcggcttaaaactgtgagagaaacttcattttcttatagttctgaagggtacaggcccaaaatctggtagggccattgatatagtttggctgtgtccccacccaaatctcatcttgaattgtagctcccacaattcccaggtgttgtgggagggacctggtgggaggtaattgaatcatggaggtgggtctttcctgtgctgttctcatgattgtcacgagacctgatgattttgtaaaagggagtttccctgtacaagctctcttctcttgtctgctgccaagtgagatgtgcctttcaccttctgccatgattgtgaggcctccccagccacgtggaactgtgagtccatgaaacgtctttcttttgtaaatgcctcagtcttgcgtatgtctttattagcagcacgaaaatggactaatacagctgtgctccctccaagggctctaaaggagaattgattttcttcctcttccagcttctggcagccccaggcattccttggcttatagccacgtcactgtaatctctgcctctgtgatcatattgcctctttttcaatgtctgtgcagttttataaggccacttgtcattggatttagggtcattctgataagccaggatgatctcttatttgaacatccttaacttaataatctgcaaagattatttttccaaataaagtaacattcacatgttccaggacttaggatgtgaacaaatcttttggggggctcccagtcatcccattacattcaccattctacaagctccaagcttgcatacagagttgccaatgaggcttttgtgccgtgcttttaaatatgaacacacagctagggatcatcagcatttgaggaaaatgcccaacacaaaagaacaaaaaacaaaatcatgaattataaaaaggtaattgagggaatatgaacaatgcagggagtagaagacaaatttaaaagctgtatctgctattagagatagaagagaaaccatttcatttacagaataacaggccaataaattaaaaaaaaaaacatttagaggttaagggctcttggaaattaatgtaaaatgtacattcattttacaaagtaatatatatatacttatatatatttacattaaatataaaaatgaaataatgtaaaaatataagaatgtaataaaatataaaggtaatacatatttggaatataaaattgatgaaattacctacaaaacagaacagcaaaataggattgatccagcttttaactataataggagttctataaaaagaacagagacatggaaaggaagaaattaacaaaaatctaagaaatgttcccagagccaaaagactcacattgccagattaaaagatgtgttgaggcagatgcaaggatgttctttccagcattatttcatggtagtggggagttggaggcaacgtggatgtccataactgggagattatataggtaaaatattggatgtataccatggcacagtatgtagcagtatgtactgtggcatcctatgtagcacagagcaacaaatactgtgtacacatgaaacataagatatcttgggcggggcgcgctggctcacgcctgtaatcccagcactttgggaggccgaggcgggcagatcacgaggtcaggagatcgagaccatcctggctaacacagtgaaaccctgtctctactaaaaatacaaaaaattagccgggcgaggtggcgggcgcctgtagtcccagctacgcgagaggctgaggcaggagaatggcgtgaaccccagggggcggagcctgcagtgagccaagatcacgccactgcactccagcctgggcgacagcgagactccatctcaaaaaaaaaaaaaaaaaaaaagaaacataagatatcttaagaacatagattttagtgaaaacaagaatcactgtgatatgataccatttacataaaactacatgcacacaaaatatacagtttgtgaaaatacattcaaatcaaaggcacattttgaatgtattataatttttttaaatttttattttactttaatgataatttttatagcagggtgatataaggtaggtatggaggtaaaagagaacaaatgagtttaattaataatgaaatacacactgaaaactcagcatgactaatggaaagtgagaaccccaaggtgaatcatcatgaaatttcagaatatcagattaaaaaatattctgaaagtgcctggtaattaggaaggagatagaatttatctacaaagaaataggaatcaggatagctttgggcttctcaatggcaacactgaaagttagtaacaaatagataagttcttaaaactttcataaggaaaataattttcaagatagaattctatacctagctcgaataccaattgttttttaggatgggatcacaatatttttgatatccattttgaaaaagttactggtgaatgtgagtcactaaaaataaggaagtaattgaagaaagagaagaacgtgatactcatggaaacaagggattcgatggaggagagaaagaagaggaattgattcccagggcgatgaacggaagtctaggatgacagaagcctagagagtatcaagcagtatcaagatttgagtagggtgacagaggcctctaaaaatgctatctgtaagaaaaaataaaactaatgtattccccaatgtgtgttattattttcaaaagagctcatggttttgccaaaactatatacagtcatgtgccacataatgacatttcagtcaatgactgatgtatatgcaacagtggtcccacaggatttagtggagctgaaaaattcctgtggcttagtgatgtcatagtcatcttaacatcatagtgcaatgcattactcacatggttgtggtgacgctggtgtaaaaaaaccctgaattgtccatcatataacagtagaacatatacaattatgtacagtatatagtattcgacagtaaatgactatgttactgatttggcatttactttcaattgttattttacaatttattcctacttatttttaaaaaagttatctgtaaaacagtctgaggcaggttcctcaggaggtattccagaggaaggcattgtcatcataggagatgacagctccctgtgtgttattgctcctgaagaccttccagtgggacaagatatggaggtggaagacagtgatattgatggttctgaccctgtgcaggcctaggctagtgtgtgtgtttgtgtcttcgcttttaacaaaagattttaaaaagtaaaaaagtaaaaagtaagaataaaaaaagcttatagaataaggatgtaaggaaagaaaatatatttgtacagctgtacaatgtgtgttttaagctaagcattattgccaaagagtctaagttaaattttttctaagtttataaggtaaagttacagtacgtgaagattaatttattgaaataaaaatgtttttaataaattcagtgtagcttaagtgtccagtgttgataaagtctacagtgccatacagtaatgtcctaggccttcacattcactcaccactcactttctgactcacccagagcaacttcctgcaagctccattcatggtaagtgctctacggtgtaccattttttaaaatcttttataccatatttttactatcccttttctatgtttagatatatttagatgtacaaatacttaatgatgtgttataatttcctacagtatttagtatagtaacatgctgtataggtttacagcctaggagcaataggttacagcatatagcctaggtatgtagtaggctataccatctaggtctgtgtaagtacacattctggtgttcacacaacaacaacattgcctagcaatgcatttctcagaatgtaccccttttgttaagccatacatgactgtatgaatatatgtatgtatttgtatatacacacatacacaaaaaaacactctaagcatttaattccatgaaatatgaaattgttaccagtaagaaatataagcatagtaagtaggtcctctattcagctcagttgtcaaccaaatttatgttgctgatgccgaattttgatatagccccttacagtgctgtgattaccttaagtggatggaggaggctgaatatgaggaggggaaagggagggggagatttcagtcaaagactgaaatcttaggttccacagtaaggaagtatttaggcaatatctaaaatggaaagataaagacatttcagtttttaagtataatatttagaaatttggaaatgaataccagaagaaacaggtaaaagagttgaaagtggttgcctctggggagtgaaattcaggggttaggagaggtaaagcagagggctgccagtttttcattagaagtctttcaaaattatttgactttttaaattctacatgtgttactttgaaaaaatagaaattaaattttaaagtaaaaatattgcacacacacaaaagtgtaggacgaaaggcgtatataagaatattcatctaacatccgtgggggaaggattggcatggagagagaccagattcagtaggattaagcaggaaacaaccatagtaatccaacgacgtggtactaagagcctgtggtggtaatttgtgaaaaactgaagacatcgtaaagaagaactttaataatgtttattttgagtggagagtcttaagacataagagatttcttctatatttactcattcagtgagtgtttgttggcattctttgttcgtgcccaagcactgctagacgttactgtctccagccagccagtacctacaactccaatgtgcaccttccataactctggcccccagagaagcctgaccacaggctctcctcttgtatttctactgagaggataatgtcatgtttgtgtaatcttatctgatattctttgtcctaagtgtgtatatattttagtttggaaaatttaagacagattcttactatatatttggggagaaaagtagatgtggtgccaacaaaagccactggtgttctggatgaggctccagcataggtttgagttgtgtcttaacagagctggaaatggaacagaacactaccatactggacagtgccttgtgtctgaccacatggactctctctggtttggaatcacatcttttcattctcttacgtctttctctgcatgggaaacagttgtacattggaagaggcatgggctttagcatctgacattcatgggtgagaagcctaaccctgtaagaaaccacttattagcattgcgaatttggataagttactctgagcctgcttcctcctctgtaaaatgggatagcaatagctctctcatatacaaaaccctagcccagggtctggcatggagtagcccttagctcttattagctgcctatatccttcgataatattaacatacattttctcagcctcttaggtccaggtggcatcacctgcttaacggcctgtggatgttcgattgatccagctgtcgggccatgggctcctctgggagatggtctgcacagattagatgtcatggaactgggatggcagatgccttcttagcacttctggagaagcctaggaagtgacagtggcagctgggaacagctgatatgaataaattttgacattttaaggagtgttcacaataggggccttataggctgggactgaaatcattctgacctggtttctttttctcattctgaagctcagcacagtttggggtgggctttattggtgtctgcagggggttcagcagcagccagtcctgtgtacaggaggggccgtgggttctctcttctgcttggttgtctctcacatgcctttggaaagattgtgagctttctccttagagtgggggtttagttgggatttaattcagaagcagcctgggaaatagcttggaaacctagggagcaggtttcttgtgacctgcaggcagctgaatgttatgtaccaaggctgttcccagagcagagagagacagaaattaaagggggaacacacatggctcctaggttgggcaagtgagggagagagtccatgtgagagggggcaggccacatccactggtgctcagggacccctggatgccaagtgtggaaatgactgaggcacctgcctctggggcacaggcattggtgggaggaaggctgtgaggcatgtttgtcggctcagatttaaagaggaagtatggatggaagcattgtagcatttttacttgtctcaaaggaaatgggatttgatgaaaaccattagcttaggcatgaagagaagcagagcttcctgtctccatggaaacaaagcagggctgcataagcacatcctgaaatgccatcaggggctacagggcagcggctaacacaaacagaaatgaccatgagccatcccactgtctccatccattgttgcctgggcttctggacagggaaaggtaaatatggggaagcagttgagctgtctcaaaaccagagcagggacagtcagaccagagactgcttccatatacgtgtggggagcaatgtgagctctcttgtgtaaagcatgccatagttttcaaagcacctttgcttttgtgatcatatttgttctttgcaatgactccatgcagtatgtggacagtatctttatttggaaatgagaagagggaggtttagttaatctccaactagttactggcagaggtggggccagaggttacaatttctcaacttctagttagtgcttattttagtgtacactacgtagcttctattcagggatactgacacctgaggtggcatacccagagatatgccgccagtggtaagcctggaatatcatcttgaccatatagatttggtgcaagttttaatgtgtatgtgcattgatgtacacactaattcacacacactgatgttcacgtatacaatgtgacccggtatgtgtacagggcagaagatgccaagacccactgtcaaggtcctgctgccctaagactaatgggaagtagtgaagtgtccatagtagaggaggaattcttctggttgcatctcatgaatgcatagagtggctcccacgacaagccaaactacagctgtctgccttgctagcaactcatgtgcaagctgattctgtgcaattcagcaagtgtttattgagtgtctgctatgcaaaagatacctggctagacatttagaatacaaagatgggtaaaatgaggagattgtagactaattatggaaatatttcaaaaatacatgtaatgggactctaagttcaaatagtccagaaggctagtccctccccaaagctaatttttttttgagattcatatatgcaggtcactaatgttgggttcctactatcttgcaaggcattgttgaggataaaaagatgaataagacctaggtcttggccacaatgggcatattaacaactataacttcagtgttaaaccttgcatctcctgttgggtgtgccattgcatcttaggaggtggttcctgagtgtttcccatgcctgacctgagacaggaatggctgctggtcttaagaaggaaattattcatgcccagctcagtgttccagatgagatctctgaggggagttggtgggtattagtttgacgtatatctgctcctcccaaggctggctgacattgaaggtgactggctaacataagggagagtaattctgctgggattctaacactggaatcaaccagtagaaagtcaatgactgactcacgcaagagttactaagtacttgttgtatgtgactcactgctaggggctagggataccaggtcaaacaaggacagagagctgctacccctcaacgggtttgagtctaggaagagatagcaacaggggagcatttaaattagaaggggcaaggatcaggtaaggccaactgaggcaggtgacagtggtgtgtgcctttgaagagccagcgatagtttgcgagcacaagggagaagcacattctagcacagaggcacaggcagaggctcatcgagaagggcttcttgggctaagctggtaagtttaagcttgattccagaagcttgtgggaggttttagattgttagataaggagatggctagatttgcatttgaagatgatcaccctggagaaggtacatagagaagcaagactggaagcaaacagagaggagcagcagttcaggggagaagcagagaagcagcggggctgaagtacagcggtggggacggaaaggacaggacagctccaggaggtgttgggggccaggtgtcggatctgcaggactcgggactgtgtgggtatgtctgagtgggtttggtgtggaaatcagagggaagtcttctggattgcttttaggtttctgaattgagactgtaggtggctgggggagaacacaggccaaagggtaggtcttaagggaaagagggcaggttttggacctgttgagtatgagaaagcgtaacacacttcatgacttttggccagttcacaggagtagagtagggtttgttttaagttgtttttcttgtaagctataattttttgagactgtgctacccatcaagcattgtgccaatcacatgacacatattgtctcatttaatcctcacagtgaccatatgaggaagtactaacttccttttataaatagagatactgtgggatgcttggtaatttgccaaagtaaacaaagctcatgagcagtagattcagaatttggactgagatctactaggcacaaacacctatgcttttaagcagatcctccagatagtttaaatgtcctttatggaaggaaattatctgtcatctagtacagcagaacttgatgaaaatgaacaggtcctccatgacggccatggcacatgtaacttcccagtcctgtggacagaaatttcctgtatgataccctgctatgatgaccagagtggggtgttcataattcctacactgatgagaaggacttttcctgggtgagttgtgtgaccatgggggtcacataaaaagcttatgggagcttgctgagagaatctgcatttccccaagacactgcttagtgtatcagttgtgaaaattgtatcttagggtgagataaaaattatttgaggaagacaagactctaagtgtcgtttgtgcctgcctccttgttacagtggaggaaactcggctggagagtgaaatgacttgctcagtttgtagacagctatttagtgttagaccttggctagaagctagctgccctggctccctgtctggggtgctttttcctccatgccctatgtatagcctagtagtaaaatacagactctagacagtctagctgggtttgagttctgttcctatcacttgccagctatgacaatgatgttaggtaaattatttcacttttctataccttcagttacccaattgtgaataaggatattggtgtttgtcatataagattaccggggaaatgaaatcagataatacatgttaagtgtttaatacctgggtgatagtaattacttaataaatgttagctgttagtagcagatttctttctcaagagcctggtttacactcagtaggtggggctgggaaagagccattcttacctaccaagtactcccattgagtcaattagcatgagctcagatgttttcagataccactggtagagctgaccatccatggcaccctacagggaacagcaaagacagactgtgcccttgggccccacatgaggccatcagcttagacactccaccatttgaagttccttggagtacctgggcctttctattctctgctcatgtggtctggagtaagcctctaattttctttgttaaattcctgctcatccctctcagcttgttttaactttggcttctttcacaagatctttccaggtctataccccccaatctcattttacaattagtattaaaatctttctcccacatgttcccatagcactatatgcctgtttgttatagaatctgtcactcatagtaatatcatggaattgttatataatttaatactactaaagataagatgtaatatttattgaaaccttgtcatctgcccgataccatggtaaatgctttatatacattatttcaattaatttttgtaacagccttatgaggcaggtactgctgttaaccccattttataattgaggaaatggagactgagagtggctaagagtcttgcctaagggtgcacagtctaatgagaggcagagctctcctcccttctcctggatgcactatcttcctgtgctttggagtcacagatgtctctgtcacccattaagttttgtttcttctgctgaggatgtctttccatgtatttggatcgctcctgatatcttagtgccttgtttttgtgttcaagaaatgattgatgaattgaagggaaaccgagtaacatcaggaccctcttagggaatgccatgcccccctatgacctcctggaggatagtattgcagagaactgaggaagaggctggcatcttaaaagtcaggagcataatcactggtactggagatcctcgaaaaacctgcagagaagctgtttgctttctggaatgttgatcccagcttacaagcattacagacaagtaattatgataggttggacatttttacacttggccattgctaatatttttttctttgagttaattccttataccatttgcccattttcccataaattggcatatttatctttttcatatgaacttagattatttgcatagtaaggatattaaccttttatatcatatgtggtgcatgttttcagaataatcacttctaaaggattgttaaagctgttatcctataggcaattgtgggcaaataaggctgttggaagcagaaaaagacaaaacagttattcttttttattttagagcatttggtttataaagcatttcatgtgtttgattcccacaataatcctaagaagtatattagtattttacaaacaaggagattgcagctcgaagtgggcaagtgacatgccctaaatgacaaatgtaagtgtgattttaggactcccagtccagtgctcttgttccacaaaggagtgcttcccctatggagtgggcatttgcaatgggacctttgctgctcagcttctactcacaacagagatgtgatttacacacatgccccagcacaacaacaaagtgctcttttgagttgattaattcaacagatagtgccaaacactgttctctagatgctggggattcaaaaatccctgcctccatggagcttatatttttctgttgcacatgtaatctatattttatgtaatattacccccattttaggactttattattaggaagaagtacaatcagcaccaacaccctgaaattgccctgtattgataacgctatgggctgtgaaatgtgaatgtgaaatgtaatgcagctgcttttggggggaaaaaggctctgattttcttgtattaattaaaattctgtctcctttcaaaaattaatctctagtgtctcttgctgttatctaccttgagaagcagaggcagtgtcaggataggtggttctgggggctcagccaaggtgagagcatccttggctgcagaggtatggcgggggtggagaggtgaagtcatagctgggagaagccaagaatcctatccagaaaggttgcatgtgagaggcagggtgaaggtgttgagggaaaaggaatagagaaatcagtaagtagaactatcaacataaataatcaaaacaaggtactgttttacaagcatttatcctttttaaagcgaactgttgacaattagattgggacttcattaggtgcctttttggatatgaagacaataaccaaatataaaaatgcctccattctctgttcaagttttcacacatgaaatttctggttgaccaagttcttaggtaactgaaacatccttgtagctcctcagccatgctctaacttagtataggtaaatcttctaacactctgatacctgtatacctatatacctatacacacacacacacacacacacacatatacatctatacatatgtacatatctgtgtatatatacacccatatatgcatacatacacacacattttcacacatgtatatgatgttttctattcatgtgcaaactgcaattcatatactccaggatttgtcccttcatttagtacttaaggaacccagtagatgattgtgccattctctgaatttgccttgcagagtgactacatttaaacttatttcaagaatgttccattttaaaatctagttttatttgttttttagaggaggagataacttctacttagtaaaatataacatgaagtaatgtttaaaaagatggctttttagataggtgaaataagttctggtgttctattgcacagtaggtgatgatggttaacagtaaggcattatatattacaaagtagcttgaagagaggcttttaattgttctcaccacaaagaaatgatacatgcatgaagtgatggatatgctaaataccctgatttaatcattaaacaacatatttatgtatcgaaacatcagattgtaccccataaatatgtacaattacaatgtgccaattaaaaaataaaaacaaatgaaaaaaatttaaaaagatggctttgctaagagacagacctggatttaatgttccagtctgctactaagctccgaagtgtacatattcacttagatatcccttaggtgtcttaagcttaggatgccccaaacagaattcattctttaacttcttttcctcatcactaaacacactctctattctttctatattctctggttttcttttactctttctgtgattcttttatcacatttgttatccaagatagaaacctgagttaatcctggtatcttctcctcacttattctctgggcctaattgctcatcaagacctactgattaagtttcataaaactatgtcctggactatagcaattgtctttttaaatgttctccctgctgtaatgcagcctgctattcatgagaaaacagtctttacaaaccagacatttaattatagaatttgtataccttagttatttataatgggatcccattgcctaaacgatagaatcacttatgtattcacttaaccagttttcaatagatgttgagcttctgtgtgccaggcagtattctagatgttaggaatacagcagggaacaaaacaaaaatccctgccctcataaaagttgctttccagtatggggagagtctaaggacatatattctgatttaggtaaatgaaaagacaaaccctgctcttgaaaaggaatacttcaaattacaaagatgtctgctttctccactttagtctttaatgtgatattgataaatgtaaacaatgtttttactaaattatattaaaatttatctgaaaatgtaaatgtataagagtagccaagacatttccttaaagaacaatgaggaacaggaactttttatatagggagtaaaatatattctaaagctacaataattgaaatgatgtgatataatataggaatacaggaaccaaatatatatatatatacacacacacacacgacatatattgtgtatgtgtgtgtatatatatgaatttacagtatatataagtgtaaagtgtcatttcaaatcattgaaaacgaatcattcagtgaattgtgtgactggctagttacttggcaggacaaaaattgagttggagccccatcttatatcttatatcaaaataaattgcaggtggagctagtacatgcattttaaaaattaaatcataaaaggattcaaagaaaacacagacaatttaaaaacttcaagggagaagacctttctaagcattatgcaaatcaataagccataaaggaaataattgatatgtttgaatttgtaaaaataaaaatacactgaccactataatttattaataacttccaaaaacaaatgagttagttttaaattttagattgattatatagaggattcaggaaggtgataaaaagatgattgataagtaataagattgtaataaagctctagttccagacagaaaatgaggatttcaagcactgatggctgaaatgtaaggtgaaaaccagctgaagattttaagtggtaaaatagtcaggagatgatgaatgactggctgtaagcagtagggaagatcacctagtatatgatcccaagattcagttgcaaatgttttggagaactttggttccatttactgacatgaataatagaagaagaaaaaagctcttattctgagagaaaggtttgtttaattttagacttagaaagtttgaagttcaagaggcctggacaagtagataggatcatccaatatctgtgtcttaagaaaagagggaggaaagatatgatacactatcagaacacaatagagaaaatggtacaaatacataaggttatccatggaggggaggtagagaagaaaaaacagccacagatagaggtttctagaaacaccatttaagagaatattaagattttcaaaaagacataccagaaacatcacatcatagaggatgaagaagtacagggtttcaaaaaggaatgagaagaccccaagtgctgaatgagtcatagagatccaatacacagttgactaaaaaatagctgttgaagctggcaatgtggaggacgtgtctgtcttttttttttttaactttttttttgaaataattatagaatcaacaggaagttgtaaaaaattacagggaggtcctatgtattcttctcccagtttcccccagtggtaacatcttgcataactgtagcacaataccaaaaccagaaaattgacactggtgcaatccatagagcttcagatttcaccagtttcacatacactcatttgtgtgtgtagttccatgtaattttatcacgtgtaaatttgcataaccactgccacaatcaagatacagaactgtcctatcaccataagaccccttgtgctaccctttatagccacatctactatcctctacccttgccaacacattcttctaattttgtcatttcaagaatgttaaataaatggaatcataggatagaaaactttttgaaattgacctttcttcacttagcataattgccttgaagtctatccaggttttccatgtatcagttgttcattcctttttatttctgaatagtattccatggtatggatataccacggtttgtttccatgcactccttggaggacatgtgaatttttttcagtttgggttactacaagtaaggctgctatgaagaacatttgtgtacaggtttttgtgtgaacataaattttcctttctctgggaaaaaatgctcaagagtgcagtcgctgggccatatggtaagtgcatgtttagttttataagaaactgcctacctgtcttccagagtggctgttccattttacattcttgctagcaatgcatgagacttctggtttttccatattcttacctgtgggcttagaaaattaaataatatacaatgaacattaataagtatcttattaattaacaaatttatctcgaagttataagacaataatgtagacccaggctgggcatggtgactcatgcctgtaatcccagcactttgagaggttgaggcaggaggattgcttgagcccaggagtttgagactagcctgggcaacaacgcgagactcagtctcttttaaaaaaaaaaattagctgggtgtggtggcatgtgcctgtagtcccagctattcaggaggctgaagcaggaggatcacttgaacccaggaggtcgaggctgcagtgagctgtgtttgtgccactacattccagcctgggcaacaaagtgagaccctgtctcaaaaaaaattataataaggtagaccaataattattaaatcatgtttttaaaattatggaccagtaagttctcaggaaaaaaataaacaacaaaactaacattggttgggtagaaaagttgaatacagagttaataacttttaattttagcagttaaagactttaaaacaaatagattaatcacaaaaactcaactgctagcttcactcaccatcaattcattaaagaaaaggtccaaattaatgttctttgttttgcaagacctctcaaagctttgctgcaacctacttttctagcctcaattcaacgattcctctgccttagcctggccacacggctcactgttcccggatttcccaggtaatcacttctttggctagaaataaccaacccccacagccacttccacccactgctgtatttgactggggaactctgactcatccttccaggtcaagtttcttcatctgggttcccattgcactatatatactcctctattagagcactcgttacgttattttatagttatttgtggaggtctttgtccctttcacaggattacgaagaagggcatcatggtgagttcactttcttttccccagcatttagcaagcataattaacaagcacacagtaagctcccagtaaatggcctcaagtgaacaaatcaaaggccaacttcctgtttgtgatgtctgtattcatcagaaattttcctgagattttgagcattgttttcagtgtgcataattcccctgaaacccaagtttaatattagctgaagagcagagcacaaggcacttgtagtaggactccaagaagtgtgccactccaagaacgtctccattacatcgagaaagagggaatatttgttatcagcatgatggacatgatcccagtgtaattgttgctgttgtgaaggccttttgaatggttttccctctccccatgataatttatctcctacattcacttcactatagctttgataccaaaatcttgggcttttccagattagaaaaaaatatgtttttgtttaaacttgtctctttttctggtctatagaacctcataataattggctttgccacatggaaatttgtaataacattagagccccacatcattctgaggttatagtccatagtcgaggccctataattagacatgttttctgtgcacttgcagacacgtatacactgaggtggctgaaataatacctcccaatttccccggctgataatcagagtctttacaatttggttatatactgggtgcttggcatttctagctgttaagttgagaagctgttagagttgtagttgaattaaaagttattttccccttggtgtcaagtgtatcactacattctcaacacttaattatcgttgtgtcccaaaatattcttcatttagcaaaatattgaaattactctttcctgttgaagaagctaactctactatgcaagagagcactgagatgccgtgttccacagagaacccaggaaatgaatggcatttgagggcatttggggcaactggaggagccccaaaacctgttaaaggggccacatattcttacctatattagactcaacttgatagctaatctttttagcagctgacacgtcctcaggctgaagctgaccagaccaaaagaggcctccccaccctcggcagagttgactgaaatggcattaaagtaggacatgacttcccttccccatgcccccaccccactaccttttgtgctgttcacagagaagtttctcctccatcctcttgtccctgtgttttcacattgtatgttctatttagatcaaggtacccagtgaccaaatataatatgaggaagggatgatctaattatgagcaattaataccttagtgagcaagagctgaaggaggaaggtacagactaattttttaaagtaaaaggtggtaagggggagaaatacttctttgatcacttactaaaatatctaatcacaaacatttattcatttattattattgttattattgagacacggtcttgctctgtcacccatgctggagtgcagcggtgcagtcatagctcactgtagcctcgacctcccaggtttaagggattctcccacctcaaccttcccagtagctgggactacaggtgcatatcaccacacctggctaattttttgtagaggtgggatctcactttgttgcccaggctggtctcaaactcctcagctcaagcaatcttcctgccttggcctcccaaagtgctgggattacaggcgtgatctactgcgtccagccaccaaacatttgttaagcaccaatatgtcaggcactctgagtttgatagtgaacaagaagatgcagtcccttgctcttatgaactttatttttctcatggctgagacagaaaacaagcaagcaaataacacaaataatgggaaatgttatgaagaaaatgagcaggctttggatagcaactttgattcctgtcttagaaagaaaaaacaatcagacttgagagaattgctgccagacttctacagcctgcattgatctgaccccgtgtgattctatggatatgcttccctcacctgacataacggctcccacactatttccctacaggagaaatgatgcttgtgtttctctagtggccagtgtcagttactctgaagatgtgatttaccaaccaactgggctaaacaaacaaacaaacaaacaaaaaccggagcaataggaccttgaatgcataattaacttgtgtggaaggcttcattcttcactcaggggtgttaaaaaggatgcctttgtgagctaaaagcagaactaccatttgacccagcattcccattactgggtatatacctagaggaatataaatcattctactgtaaagacacatgcatgtgaatgttcaccgcagcactatttacaatagcaaagacatggaatcaacttaaatgctcatcagtgacagattggataaagaaaatgtggtacatatactcatggaatattatgcagccataaaaaagaacaagattatgtcatttacaataacatggatgaagctggaggccgttatccttagcaaactaacgcaggaagagaaaaccaaatacctcaagttctcagttataagtgggagctaaatgatgagaattcatgagcacaaagaggagaacaacagacagtggggtctacttgagtgtggagggtgggaggagggagaggagcaaaaaacataactattgggtactaagtttaatacctgggtgatgaaataatctgtacaacaaatgcctgtgacatgagttaacctgtacatgtaccccaaacctaaaataaagtaacttttgaaaaaaaggatgtctttgcattaactagtggggaaagttgccctagtggattaagtaacttaatatttcttccaaaggtaatgatctggaaaccaagactgtgcttttattgatatcttcaccttctaaattccctctgtaaacacctatgaataggagggaagaaaggacctaaagtggtcagagggaacctcgaggccaaggccaagttgtatcccagactgtctggctccagagaggaaggtcttccttcagtcattcatttctggccccctttcctctgcactaccctcagaaacagtagcagatacctattgcaaggttgcgctgtgctggtcatgttcacagacaatgcaaacattttccctgctttctaggcatttcttatccatatagtctttcaaacctggtcaaggttttctcctggcaaaatttgagaagttggtggcatttgtatttgagatcatgcacctttgctgtcccttagtttaatgttccccttttctcttccctgtccttcggtcagggaggagttatttgttggacttaactagctcacgtatggggttttggcctgggttccctgaaagacgaccccaagaaaagaattggctgcaaaagggagcaagtgagaaaattgaggcagagaaggggaaaaagccaaagagttatgtgttaattgagagggttgtcagtatgaactgctgaggcttaatccactgggaaccctagaaggaaccatgtagaacgtacctcagccctgctccaccaagcaactgggaaactgggacatagatacatgtatctgtatgtttatgtatgtatgtatatgagtatgtgtgtgtgtgtgtgtgtgtatttttcccccatccatcaatccctgtccatccttgagtgatgacactttggggctgccctgtttgtggacttaacagtgcctggagaaattccgtaggtggagaagcaggaagatgtaagcactcaaagtgggcactgtcacatacctgtgtgagtgtttaagtcctgtccactgcagctgcagaacccagaggtggcccgaggggatatggggtggcatccagagcatatgctcttgctccacattcaaggagtagatcattcattcaacatttgtggagcacctactatgtgccaggaacagcttttccaaggtgagtgagttagaagaagcagagtgacaacagaattcaggactagagtgagccggagagcagatggtccactgcccagaaagaggacatcccttatagggccagcggatggaagccatgggctgggcaggacattcctgtcccaacccacatggcagctagagtcctggaaattacagtcgacatgaccccacccctctcctgaaacacagtttcctcctcccaaccccacccagcagtgcacaccccaacacccgctctgccagctctcgttcgttgcctctttctcctcaatataaccaccattttattttatcccagctcccagcgtgcatttgtcctgcacagccttgctgcccttcaccctgctcctcagtgtagagtaccatgttcccgttattattgttcagttccccagccacacagctaatcctgttagggccaatttaggcaatacaagagtctggagcttttatgacctaagcagttggggctctccttatgctaccaatgataaatgatagaataagtaagcagagggctgggcgcggtggctcatgcctataatcctagcaccttgagaggccaaggcgggcggatcacgaggtcaggagatcgagaccatcctggctaacacggtaaaaccccgtctctactaaaaatacaaaaaaaaaaaaaaaaaaaattagccaggcatggcagcgtgcgcctctagtcccagctgctggggaggctgaggcagcagaatggcgtgaacctgggaggcggagcttgcagtgagccgagatcgcgccactgtgcactccagtgtgggtgacagagcaagactccatctcaaaaaaaaaaaaaaaaaaaaaaaaagaataagcagagtctcaattaaaatactcattgatcatgtctgatgtcacagagtttaatcttaaattcagtagacccataaattaaaaatactggatctcagtagccagagggtcattctgtcttagagcccctggacacagtccccctaatatggaccaggcctcatctgaatgttccatgccccctcagctgcgaattcccatgttttctgggccagttatctgacctcttcctgcgagggcagtgcagcaggggtgtgggctctcagggggacagagggactctgccacaggcttgacctgaccatctctctcaagtctctctctacaccccagcacagagagagcagaggtctgcagagtgccacccctctagcagctctgtggaccaaacaagcatttcacctgcaggtgccagctcagcgtgccagggcatgagtgtcccccaggtggcagggtgactgcctttcttaggtggcttatgttcagtgtggaagttcaggctctctcattcctgtttcgattccttttccctctctgtctcacctggtctttgatagcaaaggttagtgttataattaaacaatcaatttagcaaattttctttggggatttcctttccttttgttttgccaactgtaattcctccagtctccagagagatcccctgtgaagtgcatctgaggtgttttcactttccctcatccacagttgttgttgttttcagggactaacaaatgacaaataagacacagcatgttcgtggtttatataagcaggaaggaatatatctgcttctctctgcaggaagagaggaggaggaaaagaggaggaggcacagctgatggctgctacccaaggccttgctccgaaacatcatgggtgactgggagtctaagaatattaattggagacagtgggaacaggggtaatttcacgtacccagtagggacatgctgtgctaagagcgtgtgagaaaatagcgtgtgagaaaaaatttacctgatggtgctgctataggtcttattttcttccatgttttgtttcttatgcaaaacgtatatgtgttaagagaaggggatggggaaggagagttcatggaggagagaagaggaggagaaataaactttgaaaattctagttgccatgacaacataatgagctccaaaagtggcatctctgaaccagttttgcatgggaaggcagagaagctcaaaagggaaagaattaaaataataaaaataataaaacagtgatcatgaagcaaaggatacatctgaagaggctgtgagcccttcttgtcaccctctgtgtgttgggagtgtcaaagctgcttgctcctggctgacctgggcagagcctgcgggattgccgtcaggggttggaatgcctttgcagcctcccgggctctggacaatgcgcagctaagggattttgacaaaaaagacctcatgcattgtgtgtgaagtgcattgtgcttgagaacccattgcaagccaggctgtcttcctgctccgtttctcctccctttcctccctcccacccgccctttcttatagctcagctttactcttttcaatgaatttcactgtagcccaagcgacagtgtgtgctgtgtcactcttaccaccatggtatagaatgtaaaatccccattattgggcactcgttagaactataaggctcttctccccagcaaagtgtcccagagctgtgcgaggcttatacaaaagaaggaagcattgagaagtgcagaatgtgaaagccaagaaggatttgtaggtaatgatgtttttgcccaccatactcaaattggaaatgcacccacagcatcttagaattatttattattaaaagtgtattttaatgaagatatcccttggtatcccttgtcctggttcaagtcgtgttcatgttttcctcattataatggccaggacgttgcactacatatgtttccataatataatcggtgtttaacagcatctgagccaatccatcagttaaggcacttgttctgagaactggttgaatgtggggatcctgctgcccccttgtgcttgtttgatattgttgcccacgagactatctagggtgtacattatgatgtctctaccaccaagctctgtgtctggcacacagtaattaatatatgttgaatgaatgagtgcttagttccagctgaagcatgaagccctccttagtatatatgtgctccggctagactccaacgaatagctgtttggcaatacatgtcaagttgagtggatgatgtataagtgaactaatatcccctatggaggacagcaattctcagtgaaataagcaaatcattgtgtgagttctgtgtatcagcaaagattaaatctattaagtttttagcttctttcagatgttaaccacttaagtagttaatatttgcataatgcttcctatagtttagaaccattagtcagtgaggggaacctccttttctctgttatatttcttggtggaagaacttcctccagaaaacactttttaggcctttgtcatcatcctttgctcattcctcctgaactgtaatagatggatttagaagaactggctgtgctcctctcagcttcttcctcctctttagaactggccggccctccaggaacgtatcttctctactcccttttgcttgtagcttctgggacagtgccctgtaatagggtaggactgggcttctgtggttgttcctatgactggatggttcaaaattctggggtatacactcaggatagatctagaagatagatgatagatctaaagtcatgttctccaacttgctttatcagaaatgaaactgattattttttgtctttatttatctaactccagtatgtcccgtgtctcagctggtttcataatcaggaggggaataaaaggaaaattgtatactgatccccacagcactgctatacatgattagaaagtcttttccccctttaaacatgtaattttaaatgatacaatacaatctcagatgtgatttttgtcaccttcaagacatccagcaattctagcaccttagatatttatatcgcaggtcagttggaaaagagtagtcacaaaacacaaattatgttcatagtacacttggctagtgtgcaatttcctgatcaccaaacacaggagaattcaaaagaagtatgaaacctggtcctttgtcttgggggcttatttcctcccacagaaagctgaaacctgccacatcttttcatatgggtgatccctgaaataggcattctgggctggagataccactgtggtttctatcatgtaagagcagttttgtagaagaggtgagatttgaacagggctttgaaaggtagctggaacttatataagcccaggggtgtcatagagtgggttttgggggagaagttttaggaataacaggatgatccccaactttgaggcaggccctaatttatttgtgggataaaaacgatattgaatatgagagtggtgggaacatcattggtttagttaggtctggttagatcatggaggacctcacagcagagggaattaaggcaggagagttactgtgggtgctggatggagggggcaggatgaccatgcgggacatagtatttggggaagattagcttgcaggcctgttctgtggatgaggacacttgcttgtctgggttctctgctgcctcttcaactttaatcttctaggaactctgagtggccccagcatgagggctctagtggtgcccctctgccagccactctgaactgtggcagacttgcccagcacagaagttaggataggctgtctctaaaagaggactgagagagtgtttattctacccagaccatggctttgagattggatatcaggatgcatgttatttttttaaaagagcttttttgttgttatcttctagataaatgagaaatcagaaacaaagtcaccattcacctgaaaaggcaccactgtctgggagcagtagcaatgggctatatataataacaataatgataataaaacaggtactgtttataaagtgttaaccgcctgttagaacttttcttattgtattgctgcacatctatctaacatgtatgtatctaacaaggacatactgaactaacaaggacacactgaatactggtattaggatttgaaaaggctggggtaaatacagacatacaaaaacaaccctgatttgaaggttttggaaggacctcttaggaaaagagggaggcaatttagcattgttttggattacggggctcaaatcctcattcttcatttaattagctgtgtcaccttgggcacattttctaacctttctcagacttagtttctccacctggaaagtggggatcataatatttcatggagtttttgttgattaaatgatgtaatgaatacaaagaacttagcacagtgcctggcacataagagatgttcagtaacacataactattaagaacctcttaaactagcctcctgtgaaacatgaattttctattattcatttttatctttgagttaaggctttttaagagcctctagataactacaaatatgatatctggtgaaagttccacattttcttcctcatggtctttcacacctttgcatgacgcacttactggcacctaaggatgacagagtcccaggagagaggtactcagacaggacagagtcattttaatagatagggagtagagttgtaaacgatgaagaaatctggaaaagaatagccggaaagttaacaaaatgtattggataactacaatgtgctaggttttgtatattatctcttccttacaacaattcagtatgacaggctgtgtttctccatattacccatggtggaatgtgaactgcaggagccttgcatacttccccaaggatccccagttagtaaattggggactaggatttttcacttgggtctctcttaatccaaagctcacgtgctttgtcctacactctgctgcccctcggaaaatgcacagagcaaaggtcctattagaagaaggcaaactcgggccagagctcctgggcagccagggggcagataaggacataatgccagggagctccatgtaaacacgtgaaagagggaaatgggccacaaggtatcctttcacaaacggttacttccagtgtccttagagctggcttggtctcaggaggacagagaggccacactcacaaggcatattacccatcaggatggcactgcagtgatgggattctgagatctttgtcctcctcctgtcagtggctgggctaacagcaggccaggctggacagtggcctgggaacatagggcaggcaggcaacctgttacttgccatagaagtgtgcagaattgacaaatccatgttcagaagggcatcaaagtccgggtgaggctgatcttctaaagttaagtccacctgtaattccagtgctttgggaggctgagcggggagaatcacttgagcagactgggcaacattgtggaacctcattttgacaacaaactttaaaaataaaaaatattagcagagcatggtggtgtgtacctatagtcctagctactcgggaggctgagacaggcaggttgcttgagcccaggagttcaaggctgcagtggttgcatcactgaagtccagcctgcatgacagagtgagaccttgtctcaaaaaaaaaaaaaaaaaaaaaaaaaaaaagagtccccaatctcagcagctagacagagagcaagagtcaagacccaggagaaaccagtgggtggaagggaagcagtgaatgaggggaatcaaaatgggcatttgggagatgtcactagaggtattccctgggcagagaatgggctgttagtgtggttcctatgtccttcttgtgacagtggctaggcactttcaaggagccaggtctgacgtgctatgatgcatgagcctccaaccattagggtgaaggatgtgatctggggtgagagcacaagccaatgatgtgacaaccacatgggcctgagtgagtgaaaactgccacagtgagcagcgtgtaggctgccaacccacagggccgggaaagtcaagaactgtgtgttccacccgcacatgttctctcatgcacatgccgaccagcccagcccaccctgcttctcacacgccctgcctccggaaacgaagagccaaaaagggaaaacctcccgagagtgctttttacatcttgccagacatcggtccacgcagcagcacacttcaccacaccccatccctgtcctcagttatcctctgtgttcccagtcagtggtctctcagccttgaagctctttcacctccttggggcgcttgaaaacgttggccagttccttgagaccttccttctcccctagatttctcatttctcacttcctatgtgtctgaccactccctcccagcatcagtaggagaaaccttcagccctgttgccataggtgctaggtcagagttgcttcccaggtgtcacacagggactcaggctgaggaatactccattgtctgccaatgctaccttttcaacaagtacccgtgcagtcgccctggaagaagggaaaggctgcagagggagcactgtcagttaaatgctttagggcggtgtgtgacagttctactgacgtttcattaggaaatgagtcacgtggccgtgcctcccctcaagggtgaagaacagttgaggagaactggatgtgttctttttctctgggttctgggtggttctccacagggagctgttctgagcgtgattgcctaccactgctctaagccttctgtgtccttgtgaccctcagatccatgtccccaacttctgcctctcctgtgctgcaaagccgtattttcaactgtgtggtagattcaaatgaagtacttcaagcttagcatcccacaaaccaaattaatttcccctaccaaaaacccacttggccatcttggggggcctctggaattcctggagcatccttatctggtctgcaaattcccttttattctgtgaaatgtctgttgctctccccatcctcctgtttatttccagtatccttgatcctgtcacacccaggtttctgccatagcctaccaaatggtgtcccttcctcctctttagtttttggcaaaaacatagctattttcctaaaaatagacctaatcatgttactcccttatgtaaaaaccttagactatttcctacaacccacagaatgaagtaaatcacatcaagtcattgggggaatggggttgtatttgaacagaaccagacaaggatctgaatgctggtctaccacctaccagctgtgagtaagttatttaacttcattgactctgtttttcaatctataaaagggagataatgatacctacctcacagggttgcctttattttttgctgtgttctgtgcctatcatctggttggctgggggctttgggcaagtcattttcttcctctacaaccagggatggggaagcagcttctctctgacctcatcacttcctactctcttgcctacttctcttcagccacactttctataactgtgaaaggggaaagagaagctctggaggtccttaccctggcaatgcaatatttgcccttaaatgtatttgccagaactggtcatgtggccacatccaatgttgggggccaagaaggctgggagccaaaagtattatgtgagcagcgttaatgactatccgattaacgatgaccccatagtgggtatagacccttgccctttggagtgcctcttgcctggtcaaggtctgacactgggaccccgtgtgaccatagttcagttgactttgtcagatttttcttagcttccttccaaagaggatgggatacacaatacttttaagtacatttaggacttgatgataaaaactgaccctccaagatgctctaactagaaggaatgctgactatcttcttgtcagttttgcttatcacaggtgaggaaaccggaggaccaagaagggtgagacattcccgccaagctggttgctggcatctcagactcagtatggccacctctgaactctcattgtccctcccagcaaatcccaccctccagcctatatttcctcaatggctggttgtattagtctgttctcacattgctataaaaaaatacccgagactgggtagtttatgtagaaaagaggtttaattggcatatggttccgcagactgtgcagtaagcatgattctggtatctgctgaacttctggggaggcctcaagaaacttacaattgtggcagaagttaaagcaggagctggcacgtcttacatggcaggagcagtaggaagagagtgagtgagtggggaggtgctacacacttttaaacaaccagatctcatgagaacttactatcacaagagcagcaccgaggggatgctgctaaatcattcatgagaagtacctccatgatccggtcaccttccaccaggccccacctccagtgttggggattacagcttgacatgagatttgggcgggaacacagatccaaaccatatcactggtgttgccattgatctctacttgtcctttaacatgcagtgtcctcttccatgaataccttccccagttccttccatagaattggagcccctcccctccctatgttatccatgtcccatttatggcatatgacgttttatattggtttacttgtctggctccttggtagataagattgacttgagtacagcaagggcatcttatgcatcttatgcatctttgcattttccagtctagcaagtggcactttatgcaatggcactggatagaattcttgtctgaattattggaaaagaaccagttcccacaggttcaacaacaggcagtggaagagttggaacttctgatttttgttctcagtcacttactactgaattgcatttagcttacagtttttcagtctcctgcagcattgtgttccatgctcttatgcttgggtttaagagacttttttaagatcagattttatttctttcttcttttattttaggttcaaggaggtacgtgtgcaagtttgttacataggtaaattgcatgtcactgaggtttggtgtacaaatgatttcatcacccagatagtgaccatagtacccaatagggagtttatcattcctcactctcctctgatcttcatcctcaagttggccctgatatctattgttaacctatttctgtccatgtgtactcaatgtttagttccctcttataaatgagaacatgcagtatttggttttctgtttctgcatgaagtcacttaggataatgtcctccaactgcaacatgttgctgcaaaggacatgatttcattcttttttgtgtctgcatactattccatggtgtatatgcaccacaatttctttatgcagtccactgttgatgggcatctaggttgatttcatgtctttcctgttgtaaatagtgctgcaatgaacatatgtatgcctgtgtttttatcgtagaacaatttatattcctttgggtatatatacagattgctccttcaggccaggctctaggggaaatatgacaatgacttgatcaggtttgctaggtcaaatggtagttctgttttaaattctttgagaaatctccaaactgctttccacagtggctgaactgatttacattctcatcaacagtgtatacgcgttcccttttctctgcaactttgtcaaatctcttattttttgacttttaataatggccattatgactggtgtgagatggtatctcattgtggttttgatttgcgtttctctaatgattagtgatgttgaacattttttcatatgctttgttggccatgtgtatgtcttcttttgaggagtgcttgttcatgtcttttgtccatttttaaagggcttgtttggttttcactgttgatttaagtttcttatagattctggatattagatctttgttggatacatagattgcaaatattttctcccactctgtaggttgtctgtttattcttttgttagtttcttttgctgtgcagaagctctttcatttaattaggtcctacttgtcaatttttgtttttgttgcaattgcttttagagtctacatcatgaaatctttgccaaggccaatgtccagaatggtatttcctaggttttctcctagggttttcatagttttaagtttttcatttaagtctttaatccattttgagttgttttttgtgtatggtgaaaggaaggggtccagtttcaatcttttgcatatggctaaccagctatcccagcaccgtttattgaatatggagtctttccctattgcttcttattgtcaactttctctcttgtcttcatttggtttgctgatttgctttgtttcatgtttggtgataatgccatattcccattcaagatggatgttcttcctaaataaaggattttttaaatcctttttttttttttttgccttgttagtgacatgctacagaaaataaacagggtaattctgatttgtgattggacagcctttgaattaaaggagtacatatggctttggggggcttaatatattgtaaagactgagttactcttgagattctctgtaagtttttcaaactgtaaagtggctgacatttgaaagtattatatgtaacatccagcatcatgtctgctgcatagtatatactaattaggagaatttgatgaacaaatggagaagttttcctcccaggagcatgcttacaaaggaaacatttttttttttttttttgccttgcctaggtagcacatagcccacctttaagtttttttttttttttttttgagacggaattaagtttttaaatgatttttatatgtgttatttcatgtcctcataacaagttgttgtgcaaccatatatattatacctctcaagtcaagtattatgttatgaatgccttgtacaagtgttgagggaaccgagttggaatgtgaataactaacccagtgtggtctatcttctgccagtaacagtttcattgcacaatcttccttactggaggtcagtcaccttaccccactgacttggcccctcttggagtatctcctttttacttttggaaggttctcagaactttctcaataatatttcaaattgccatgttttggccaggtgttttcagttgtgtaaatcttaaacccatttctggaagatgttctcagtcctggtctcacctattcaataaacttaaagtttctgctatgagttaagtgctctgttaattttggtggggaaagcacaaacagacctattgttaaggcacactctcaaactttgtctggaagaccttttggaatacttcacctatatctcatagttttattatttctggtttctcaatacttactcatttgtaccccacttgtttcctatgttgtatataaaatgaccctgtcctttatattttttatctcctgcatcctagttctctaagttttacttcctgaaagcaatcaaatgcaactaacattgggtttcatttgagttagacctgtagagtgcttgggctagaaaggctctcagggagcactttgcagttaaaatgaagccacccccacccgcccccactctctgcctccccagggtagtcttgaccaagacctagagacagtgaggggtagattagggccagaatccaggcccctgactcctagtcagtaccctatgtctacctatccttgtccggtgaaccttttgatatttgatttccatccttgttatccctttttctttatttgatgctaagctattgtcatcattcctcattagatccaattacagaggcttggaggccagtaagaaccaagttttttttttttttttttttttttttttgagatggagtttcactcttgttgcccaggctggagtgcaatgatgcgatcttggctcactgcaacctctacttcctgggttcaagcgattctcctgcctcagcctcccgagtagctgggattacaggcatgcgccaccatgcctggctaattttgtgtttttagtagagatggggtttctccatgtttggtcaggctggtctcgaactcctgacctcaggtgatctgcctgcagcagcctcccaaagtgctgggattacaggtgtgagccactgcgcctggccagagccaagttttttaagggatggcttcacgtctgagttttggcctttcacactgacttgctatggctggtagcaaggtgatgaggctcttttaatcttcatagatatccagataatacagcttggatcactgatagtaggaattacaaggccctcctaatccagtgaggacatggtgttcagaggccaagacatggtggggatgcttgcagcaccttcatgtgaagagtttccctgcatggaggtgtttggaaaacaggcttgtgggtgaggggcaaagagagttctaaaaagactgcattgaccttttggatttttctgtagctcacctcaaagacaggcagagatcctgggtgacatgtggtgccaatttttattgtattcctactggctctgtagatattgtcttttgttatgtccttggcaagagaaatgtgattgatgtgattgggaacatgagactggtggggtgggggtggttctcaagctccccataattcacagatttcaagagaggagcacagaaggacttcatttgaagggaggaatgaaccatctaacctccagtggcagatgggagccgagaccctggagtcattggggcagcagttgcctgagcaaggggaataacagcagtttcccaccaaaagtcttctattgggattttcatgttttctgtcctgccttttaatgttttttaatgaacaataggatctatgactctttatgccttggggagtcactcaggacaagtttcatacccccacttggagttgggattattatttactgatttagacagcttggggggctgtcaccacacttcttctgtcttgtccagttcacccctcagctggctaagtctgagaaggtgttacacgcacagctcaggaagaaggcatgcctaagtttctaactaagtgaatgcaaggcagctgggtctgagagccccagaggctcacctctgcacatggtgagggaaaaataaagatggcttctgagtgattttatgacttttgaaagaaggggcattgggacaaataaaaggatacagccaatggacacgcagttctttggactggaagaaaaattataacctgtttgcttttagggtcattgtattcatctacaatagtatatggtttgttacagattccagggcattttccatatatatattttattttttttcctactataactttaaaagacattatttcccccattatttcaattaataaacaaaggcttattgatgatttaactagaatcacatagaatatgccagagtcagaacttgaaaccacctttattccttctggctcagtgttttttctcttattattcaatataactcaattccctcataaccatgaagcattgtgttttcgtgacttatggttcattgacttccaaacatcattttgtctgaaatatttcatatacacaaaagaatatatatatattacatatggtttgttccatatatgtgggacaaatgaaaatgaaatgagtatctgggcactaacaataaagcttaagtgatagaacattactgatgccagggaaacccaattgcctttcctgcaactctcgccctcccactcaagggtagtatttattatccctttgcttatcatttagttttaccacttgtgtatatttccctatgcaatatatcgctaaatgttatatgaattgtaaaatacagtgtatgtttttatagaggttggttcattcacttcactttcgctgctgagcagaattctacacagcagaagtgtaagtgtattgcaagttatcccctctccacttctagaattttgctaatgcaagtgacattgctatgaagattctggaaattttctggggctataggacatttgcatgcttaactctgcaagataatgcccaattgctcttttcccctatcctttttaagttataattgacaaaatttttacatatttacaaggtacaaagtgatgttttgatatatgtatatattgtgaaatgtttaaatcaagctaattagtctatcacctcaaatacttatcatttatttgtggtaagaacatttgctatctactctcagtaattgtcaaatatacaatacattgatattaattagtcaccatgctatataatagacctccagaatttatcctgtttaactgcaatttttaccatttggctaacatctctccatttccccttcccactccagcacctggtaaccagcaggtgctgctggtctactccttgcttctatgagttctacttttttagattccacatataaatgagataatgcaatatttgtcttcttgtgcttagcttattctatttagcataatgtctttgaggttcacttatgttgtcatgaatgacagaattttgatttttttaactttaagttctgagatacatgtgcagaatgtgtaggtttgttacataggtatacacatgacatggtggtttgctgcgcccatcaacccatcatctacattaggtatttctcctaatgctatccctcccctacccgccccctgattccttgacaggccccggtgtgtgatgttcccctccctgtatccatgtgttctcattgttcaactcccacttaggagtgagaacatgcagtgtttggttttctgttcttgtgttagtttgctgagaatgatggtttccagcttcatccatgtccctgcaaaggacatgaactcatccttttttgtggccacatagtattccacgatgtatatgtgccacattttctttatccagtctatcattgatgggcatttgagttggttccaagtctttgctattgtgaatagtgctgcagtaaacatgtgtgcatatatctttatagtagaatgatttataatcctttgggtatatacccagtaatgagattgctgggtcaaatggtatttctggttctagatccttgaggaattgccacactgtcttccacaagaattgaactaattgacagttccaccaacactgtaaaagcattcctgttcctccacatcctctccagcacctgttgtttcctgactttaataattgccattctaactggcatgagatggtatctaattgtggttttgatttgtatttatctaatgactagtgatgatgagctttttttcatatgtttcttggtcatataaatgtcttcttttgagaagtgtctgttcatatcctttggtcatttttttatggggttgttttttttcttgtaaatttgtttaagttctttgtagattctggatattagccctttgtcaaatggatagattgccaaagttttctcctattctgtaagttgcctgttcactctgatgatagtttcttttgctgtgcaggaactctttagtttgattagatcacgttggtcaattttggcttttgttgccattgcttttggtgttttagtcgtgaagtctttgctcatgcctgtgtcctgaatggtattgcccaggttttcttatggggtttttatggtttggggtcttacgtttaagtctttcatccatcttgagttaatttttgtataaggtgtaaggaaggggtccagtttcagttttctgcatatgactagccagttttcccaacatcatttattaaatagggaatcctttccccattgcttgtttttgtcagatttgtcaaagatcagatggttgtagatgtgtggcattatttctgaggcctctgttctgttccattggtctatatatctgttttggtaccagtaccatgctgttttggttactgtagccttatagtatagtttgaagtcaggtagcatgatgcctctagctttgttctttttgtttagaattgtcttggctataagggctcttttttggttccatatgtaatttaaagtagttttttccaattctgtgaagaaagtcaatggtagcttgatggggatagcattgaatctgtaaattattttgggcagtatggccattttcatgatactgattcttcccatccaagagcatggaatatttttccatttgtttgtgtcctctcttatttccttgagcagtggtttgtagttctccttgaagaggtccttcacatcccttgtaagttgtattcctaggtattttattatttttgtagtaattgtgaatgggaggtcactcatgatttggctctctgtctattattggtgtataggaatgcttgtgatttttgcacattgattttgtatcctgagactttgttctagttttttttaatcaagtattttggattttctacatagacgacttctttaaatttcttaggcttctttaaagactttatcttggtgttatggagtttactctaatggtgctagttatgggtttccttttagctatcctgcttttatatgcattgtgctcactgcatctatgtatctgaatatttcattcttgaaaaatcaaatattatcttttcaaatattttctctcatcatttgtctcttctcattttatgaaactctgacttgacttatttaagatcttcaacctaacatttctattagcctcactttcagttttctcatctctttatttctatgcactgcattaaaaatatatatgtgtatatatatatttatttagttctttgattttatttatcagagttttgtagttttccttatgtagatattgtacatatttggtcagatttttacttatttaatttttttaggtactacattttacatacattttctgttctgctatctgctctgtcctgtaacctatctttgaaatttaaattttaaagaaaaaacaacacaaatgatcaaaatctggaatgaaaagggtggcatcactatagatcctacagaaatcagataattaaggttatattatgaataatgttgtgccagtaaattcaataacttggataaaatggcaagtttcttgaaaaccaaaataccaaaacattgccaaaaaaccatatgatcatcttaatagatacagaaaaagcctttgataaaatccaacattgctttataataaaaaccctcaacaaactagacatcaaagaaacatacctcaaaataataagagccagctgtgacaaactcacagccaacatcatactgaatgggcaaaagctggaagcattcctcttgagaactgatacaagacaaggatgcccactctcaccacttctactgaacatactactggaagtcctacctggaataatcaggtaagagaaagaaatgaaaggtattcaaataggaaaagaagtcaaactatctctctttgctaacaataacaattctacatctagaaaactctaaagacttcacgaaaagtttcctggaactgatgaacaacttcagtgaagtttcaggatacaaaatccatataaaattcagtagcatttctatacatcagtagtgttcaaactgagagccaaatcaagaacacaatcccctttacaatggccacaaaaaataaatacctagcaatacatctgccaaggagatgaaagatctctaccaacaagaaaaactataaaacactgctgaaagaaatcatagatgacacaaaaaactggaaaaatattttatgctcatgaattggaagagtcagtattgttaaaatggccatactgcccaaagcaacactatttcaatcaaactacaaatgtcacttttcacagaattagaaaaaactattctaaaatttacatggagctaaaaaagggcccaaatagccaaagcaatcctaagtagcaggaacaaagccagtgacatcacactacctgatttcaaactatattataagactacagtaacccaaacagcatggtcttggtacagaaacagaaacatagaccaatgaaacagaatagggaacccaggcataaggctgcaaacctacagccatctgatcttcaacaaagttgacagaattaagcaatggggaaaggaatccctgctcaataaacaatgctgggatagctggttagctagatgcagaaaaatgaaactggacccttacctctcaatatatgcaaacattaagatgaattaaaaatttgaatataagacctcaaactatgagaatccaagaaatacacctaggaaacaccattttggacatcagccttgagaaggatttatgactaagtcctcaaaagcaattgcaataaaaaacaattgacaagtgggacctaattaaactaaagagctctgtatggcaaaagaagttatcaacagagtaaacagacaacctacagaatgagaatgcaaaatatttgcaaactatgcatccaacaaaggtctaatatccagaatctctaggaacataaacaattcaacaagcaaaaaacaaacaaccccattaaaaaatgggcaaaggacatgaaaagcactttttaaaagatacacaagcaaccaacaaatgtgaaaaaaatgctcaacattgctaattattggagaaatacgaatcaaaaccgcaatgagataccatctcacaccagtcagaatggctatctaaagcaaaaaaaaaaaaaaaaaaaaaacaacagatgctagcaaggctgcagagagaagggaatgcttatactctgttggtggtaatgtaaattagttcagcccctgtggaaagcagtttggagatttctcaaagaatttaaaacaaaactagcattcgacccagcaatcccattactgggtatataattccaaagaaaataaattgttctacccaaatgacacatgcacttatatgttcattgcagcactatttacaacagcaaagacatggagtcaatctagatgcccatcaatggtggattggataaagaaaatgtggtacatatacaccatggaatactatatatccataaaaaggaatgacatcatctcctttggagcaacatgaatgcagctggaggccattaacttaagtgaattaatgcaggaacagaaaaccaaatatcaaatgttctcacttataagtgggagctaaataattgggcactcatggacataaagatggcaacaatagacactgggtactactggaggtggtagagggttgaaaaactgttgggcactatagtcactacctgggcaacaggatcattcatatcccacacttcagcatcacacaatatactcatgtaacaaatctgcacatgtaccctctgaatctaaaataaaagttgaaataaagaaaattaccaaaactaagagaagaaatttaaaatctaaataaacacagatctgttaaaggaatttaattcatattctaaaacttcccacaaagaaaactgtaggccacattgttttaccagtcaattctaccaaacgttaaggaagaaataatgctgatccttcacaaacccctttaggatatgaggcaaggggaaaaacacttctcaactcatttgatgtgatcagcataaccccattacttaaacctgacaaatatgtaatgagaaaataacaatgtccattgtgaatgtaaatgcaaatttccttgaaaatattattaaatctggcaaaatataaaggataatatgtcattaccacgtgatgtttaattcgtgaatgcaatgttgatttagcatttgaaaatcagtcaagttaatgtactacattagcagtaaaagagggagaaagcatacagcaccttaatatgtgcaaaaataacttaaaacttactagtcctttataataaagacttgcagtaaattaataatagaaaagaactttctcagtctgatgaaatggcattgctattgtttgaatgtgttttccaaagtttatgtgttataatccccagtgcaacagagttgagaggtgggacccttaagaggtgattaggtcatgacagctctgccctcgtgaatggattaatgccattattgtgggagtgggttcttgataaaaggatgaattcatcccactttcccatgctctgttgcataggctttgccattacacccttctgccatgagatgatgcagcaagaaggcccttgcaagatacaacccgttgatcttggacttctcagccaccagaacaatgagccatgttaattttggtttattgtaaattacccagtctcaagtattctgttatagtggcacaaaatagcttgggacaggcatctataaaaaacctacagccagcatcatacttaatgaaatattaatccctcttccctgtaatctggaaatgggcaaggactttcacttttaccacttgtctttaatgttgttatgtaaatctgagccatattaataaggaaaggaaagaaaataaagggtacataaattggaaaggaaaaaataaaaaccaattttttcacagataacatgattatgtattttgaaaatctaacagtagactctaaactacaagagctaattaagtgaattcagccaggtcacaggatacaaggtcaacatacaaaaattaattgggttatatatgcttgcaatgaccaagttaaatttaaatttaaattaactaaaaatggatgttaaatatttaaggaataacaaaaaaatcaaatatctagaaataaatctgacaaaagatgtcaagacctttctactgaaaactacagaacattgctgaagtaaattagtcttttgaaaaatggagagacatggtatctttatggattgaaaaacttaatattattaagatatccattatctctaaatcaatatggagattaaataaaatccccatcaaaattctagcaggttaatttgaagaactagacagatgattcaaaacttgatatggaaaggcaaaggctttagagaacccagaacaattctaaaaagagaacaaaattgtaggacttattacactacttgattttaagatccactgtaaagctactgtaatcaagacaatatggtattgctgtcaacagacaaatagaccactggaacagattagagagcccctcatgtatattggtggttgatttgtggcaaagatgcaagttcaatttagagggggaaaggaaagtcttttaataaattttgctatatccactgtatattcatataaaaaaagtgaatctacagctgggtgtggtggctcatgcctgtaatcccactttgggaggctgaggtgggcgaatcacttgaggtcaggagttcgagaccagccaacatggcgaaaccccatctctacaaaaaatacaaaaataacccaggtgtggtggtgtctgcctgtagtcccagctactcgggaggctgagacatgacaattgcttgaatccaggaggcggaggttgcagtgagttgagattgcgccactgcactccagcttgggcatcagagctagaccctgtctctaataaataaattaataaataagaatctagaccttcctctctctgtgtagattaaaattaatttgagaatatctttgcgaattcaggcgagacaaatgtttcttggacagaatacaatataaaaagcataaacaatgaaatcaaaacaattaataagttgggctttgtcaaaataaacaatttctgtttatcaaaagatgccattaagaaaatgaatataaacaagacacagactaggagacaatatttacgtaacatatatctttttttttttttgaccttggagatttccatcacttttttgtaagcttaggaatgcattaattatcatgcttgtcaatctagcacttgggtgttttgtgtaaaagttatttcagaacactggtgttttattctgccagagtagaagtcagttctttgacttttcagattctctgcaaaatataacatttttctgagcagcattaggtagaaatatactatagtatcatgtgattaccttatttcacacaaacagaattatataaccaaattctctatagttaccccttcagaagtaaagcctatacttactagtttcccagggaggagtcgttattgcaaaggagtagattaaacctgtggggaaaaaatgttggcctggtgtatctttttaggcatcagccttcctgtaagtggagctgtgaccaggtgtatgtatgcacatgtgtatgcatgtacattttcatgactgcagatgtagacacgtgtatgcacagataatgtttgcagataagatgtattttcagataagaatggagtaatattttaacttgggttcattgtaatgtttggatataagatatctaaaaaaagatcagtgtttattggtagagcgtgattacttgcaaaagaatttgactattttatttatgctagtgacaactagtgtttttcataggaatccatttctagtaattactgtttgataatataagggtaatgtgaatttcctgcttcctgcacataataagaatgtgaatttaatgccttctttatagcctcatttctccactccatagagcaggatgaggaagagatactctgtagtggagttcaggggcttttctgacctcgggtcctatcctttcatctgagtacatcctcagagacaagaggcagaagagaatacagaaggggaaaaataggatgaaaaagaataacaaaagcaggggaggaaacacacaggaagaaagaagaggaaaatacactgaaaagctgtggtgaaatgttgctgatgtaatcctaagggcctcaggtggcacaggtcccctggcttctatttgcctctctagacctatctgtggtcagaagaaccttgttctgtcagtacttagatgtatgatcttgaacagattcttaaacatcctttggcttcatttaaaaagtgagctagtatcaggtattttgtagttttgtgaaaatcaaagcagatagtgcttacaaacttcagcagagcatctggtacatcataaacacaaaataagtggtcattagtatgatgatatcaataccacatcttccagctgcaaaaaatggttttgctccagacagtgcttttcaaactatccgtgtcgaagaattgcttctaaacattaccagtctactgtgtgtttatacttttgtaaaatgcatttgtttataaaaagaattacctgaaaactgaaatgaaaaatataaacagatataaaatacagccatcaatttttattcttacatttggtagacatcaaatatctgtaaaattattgtagaagttactagtgcttttaatttctgaatttatcttatggactggaaatagtttgcagataggcattggtccatggttcacactttgaccgatacttcatacactgctctgtgaagagcagatctactgttgcctataaatacataagggtggactttgctaaggcaagggacttaggagtatttagaagtctatgctggggtgggggttatggtccaagctggaagcttccaccctcgtgcatgtctctgatggctccaaactctggagagtctgctttgaaggaaatcttcacataaaaggtcctatgtaaaaatgtcttctcctgaaggtggtagagttatttagaatctatgaggtgaacagctagagttcagaagttgtctaacagtctacacgtattcagtaacatagactttatcaaaagatgcactctcctcctctctaaacctcaccagtattccttcccttccagtgttgatttgtattatccttgatgcaaatgtctgatttgagttaatatttcaaggtcacaaagtaataagagttgtcaactgacagtactttgtactttaagagagcagctccttaggaatttcagagtccactcttatctgttgaagatctaccatactaggcgccatgactggtgccttggttcacatgggcttgctgatgcagcagctcagtgaagttgcagtttttatcaatgccatttattaggaaattgaacttcagaaagcttcaataacttgcctgtggtctgattcaaagataggtgtaatgagtcccaatacagtttttatttttacaataccacaggtttaatcgtctttcatggcattttgtcactgtcattgtatatgtattgtacgaatcctcatggaaaagtgcatagcctaccacagccctaggcactggagtccatgacaggccagccatctagtaagaaaatgtctttgcttgtatgtcaccagcttttgtttcatttatctctaatagataaggatattttcaataaggtaacaattaattgcattttaatgaagaacttaggttaactgtaagacaggcttaaagaagttggtgatttattaaatatcctcaatttaagaaagacttctaagtaagggatgataacggtcaacttaaatgatactgagactacagagggacaaagtctcaattgcagcagaaaatatttaagctgaatatagtgaagaatttcctgccatgatgttgctttacagctttggaatagtcttgaaagttcatatagagtgtcaaagaataggtgtacagcttgttttcagaaggtcctggtagagaattcttagattgactacattaccagtagatatgatctgcagtggttgtgactcatagaggtaacctccagaagaaagaatatgtacttctgaacgttctgatgcctttatccattcatgcaacaaatattgcttgaattccttctaggcaccaggcattgttctgaggatatgatggtgaacatggcagaagagatccttttattgtgtagcttatattcttgagcaaagacaaaaaaccaaatagctgaacaaggtagcttttagggacagatgttattaatgaaataaacaggttaatgtggtagagtgcagcaggtaatggggccattaattttaattttgtgatcaggaaagttctcccatcccacgccagtggtcgggaagagagacagagcagatctatggagggtctcataggccacaataaagggtttgtattttaacaatgagaagccagcagaaagtcttaaacagaaggatagcatgatgtattttgaattcacaagtcaccctgttttcctgctatgaaggaaatagggggattgggacaaagatggaaatgtgaagtcagtaagggaggctactgcgctcttgcagccaactgaaggcaagaagcatccaggcaggagacagcagtagcctggactagggtgacagcagtgggtttggagaaaaggggtaagactgccaggaattgcttatggattgggctgaggttgggatgagaaaggaagaagggaaaatgacccctaacttgggtggttttgtttactgaggtgggagagactagaggaggagaagtttggggagaaatcacttggccatgttacatccgagatgcctatttgacatccaagtagctgatgtcaagttgacagttacataactgggtttcaagctcagtggtgaatttgggctggagacaaaaattcggtagctttcagcatagagatgatgttggaagtctccatgggcctgtgcaacgtcacctggagggagaatgttttagaagagaggacctatgcctgggccctggggcactccaatgtctagaggaggagtgaaggagattgagaagaatcaaacaaaagagtgggtgtcatggaagcccaagagaagaggcctctcctggaaggataagctgaagtctaaagatccactgagccccaaacccctgttgagtccacagaccctggacccacacagcttcaggactgacctggaattgagctaacctcagttgttttaggtcaaggcacagggtgtgtgccccctccactccattctctcctgttgttcccaaatctgaactgcttcttgtctggtggctgcccgtagtgtgtggtgcacttattcatgatgtaaacagttgccagacagcctgtctgtgctgggacttcaggcataaccatgaacaagagcaatctacacagtttctgcccttgcagagcttacagcatcatagggtcaccaacgagaaatgagacaattccaagaaatggaaatagttgaggtacagctgcttctagtacagactgtgtgatatgggtaagtcaagttgctgttctaagcctggattttcctgcctgaaaaatagaactaagtctgagagactttctaagataccctgaagatgtgaattaatgactgtgtgaatcaaaactcctatacatcccatcccattttaattgcatccctggaaaggacagcgagtggaaaggccaggctagtccttctgtgtattgagtcacgtttggtgcgttagcccacgccgagcctctaaacttccttccgctcacttcgagtctctcctcaggagctccccctgctccattttccctcatattttggctcttctttcccatctccaccatcccatttctgtgagctttgggccttctccttggttccacttgaccgtcccaaagcatataaaaggacttgttttcataaggaagaaccttttggtgatgaaccatgacattttgccttcctgagaggaatctttgatgtttaaattatctggggatgtttaacaaaggaatgtgggaaatgcaaaactttttacaaaggggaaagatgcccacacagggtgaagtgtacaaagcttcaacctggtaataaactctcaatttcttccttgaacacagctgcacctctcctcagacacctccaaagcttttggggagggagctggttgctgtgccttctcagaggagtgcgaaatgtgtctctgagaagaacacagccatttgttctgttaggatgcttctttcagactgtaattagagtgctgtggggggtgtagatggaggagaaagaagaatatgaaatgctcttacttccctgtggctcattcttcctgcaccacggggctttgaacccactgaaatattgtgactgaaacatacactgttatatgcagagacagagagaaagcagcatgtacacctctgagttcatgccttgatagtatctgtgtgctacaatgaggtggcgcagactggcggagaattaaacagagtaggtctgaattctgctgtgtaactctttgtctttcaacactcttgaaagcctttatttttccaaactgcgaaacagagatgaaagtgtggtcccctagcccttttcttaaaaggttttaaggaccaccatgtgagaactcataacttttcaatattcatagtacatgctattctgtgatcatcccacttatgggagggattcatgaagcagttataatgaaatagtgtagcatccaagaatatttgtgggttttttggttttgttttaaactttatttgcagcaatatcaacaacaatttattgatgatgttttactgaattatcagttaacatctttctagcatgtgccagcagaggggaaggagggtggcagagaaagagcatctaggatggttctgtttcattcacagcagacaatccttgaagcagctggcacatattgtgtggatgacagagaatttggtgctattgagcttaatgatctttaatataaacatgtcaggatatccagctgacttatatacacagctgaattcctgatcctccctcttcccaaacctgctccattatcttttccatcctggtttgtttaactccattcttctggttgctgtagcttaaaactttggggtcatcttggatgcatgtctctcttacactcctcgtccaccagccagcaagtcctcctagctgtgtcttcacagtctatccagagccccactgtttctcatgagctatactttaccactctcgccaaggccaccatcatctggatacaacctggaagatctccctgcttccacccttaatccccttcagtctcttttcaacaggacaaccagagacattctttgcaaacttaagttgtgggactcctctgctgcaactgaccaatcgtttcccaatgacaccaagtaaaactcaaatctttatagggtatctatggccctacatgatggccctccacttccccactgcctgctaccactctgaccttttttccatgtattcagtccactctagtcacattggctcttttctgttcttcaaaagctcctgcaagatgcttctgccccacagctttgccctggtcatcacctctgcctggaatcctcctccccggatgtctgcatggctcacttcctcacatctctcatgtcattcctcaagccacctcagtgaggccctccctggccactcaaccaaatattccagctccccgacacccaatacttactatacttctctgctttatttttccctgaggaattatcagtttataacattctgtttattatgcttatttatcttgtttattgtttttctcctgcagtataatgtaagctctgttgaggacaaagatttgcttctttttttgagaagggggtcttattctctggcccaggctggtcttgaactcttgacctcaagccatcctccttcctctgcctctcaagtatctgagattacaggtgcataccagcatgcccaattatacttgctgctatatcctcatattctaaaacagtacctaccatgtagtaggcactcaataaattgtattttggaggtggaatgaatatataaaataaaggccttgataataggttatctgtattatgatacattctcagaaaagtcagtaatataacagctacttggagcacctactataccttgcacattctatcatttaatcctcacaacaaccttttgagataggtatgatcattattcctaattttatgaatgaggaaactaagatttagtttaagaacttgccccagatcacaccacgatggagctaggattcaaacccaggtctgtacaacttcagagcttttaatcattatactttaacattctggattccaccaacttcaaggttaaaaaccgaaacaggaaacatattccagttccttcattatctcccttacattaattgtcatgcttttcttcccctgtgtctactcaaacaaataaatgagatctcaatattgagaagagaaagaaaaaagaccagtcattccctgagctcctaaaagaataatcttctttgagttctcataactgaaatgtcatgaagctgtggaatagcactggctttggaacgtgatgctctaggtctgccgccaccgccctaatccttggaaatggcaagtcatctgacctctctctatgccttagtttccctgcttatggaaagccggtcttggacaggtgatctgtcaggttcccctcgcctgatatcctggtctgtgagactcctggtctgtcttccattgccgtggacataaggtggtggagtaggagtgggatatagcacttcatgtaatgccatttatttgccttaaccactttagggaaggatttctgctcataggaggagccttctgaaagctccagattctaaggaagaatgaccccatatgatgtcgtcgagcatttgcatcacccatcctgcttattagagtcaataatggataggatttagagggctagcttctgttttggcctttattgacaacctaagtctccttaaatcctttctggaacaagtcaagggataaagcataaacaactttaatactgctgaactctatgaccttcaggaaggtgtttaccttctctggggctgtgtttgcttctctgaaaaatgggagaaatggttccccaggctcgtaagaacactgaaaatatagaaacattgaagaggctcaccctaaccccaacccattttccaatggcactgaaatgaaaccactgccaacacagaattgccaatcttgcttccaatttctctgttagtttcagaacatttagggttgaagaggtttttcttgatgtctaacccaaattcctccttcctaaagcaaagactttacaggaaccttggcaaggtttccctatgggtagcaaagctctctgaaacatggactctgaagattaataggaatatgaccatgtggccatttgtgtgcttggcagagtgtgtgtacgtatgctgcttgtgccaggatgagtgtgtgtttccatgccaatgtgtgtgatgaagcatgcaagtgtgtacagtagtgtggataaacagatctttgagtcacacaggccagcccatcctggcactttgtcttccttttggttgtcatgacagcagcgaggggctgtgcatcagtaaacaaagctccctgcatggagccgggaggagaggtctggagcgagaggctaaaacatgagtcaagcagtcctccaaccgaggctttcttaccccagccgacctaccagaacatcttcatcgctagacaagcatcgagataccagtccaggtgccctgtgactgactctggggtcacataacatgggcagacatttcaggctggagctaggctttcatcaacctcacttctaatccccaagagttagcaacagcataatcaagtctagaaatgtgaatgaccgaagaccctcctagtatcagcctatgggctaaaaccagttacttcattaaggcagaaattagccactttgtgatttgtctgtagcagtggctccttataggttcatacattcataaaatgctaattttaataataacctaaaatgatttcaaagaagtctctgtcttctctcccctcatccctccaggcacacatgataaatgttttgggcattctaccttgtatgagattatgtaattcttccacttcatcttaatgattaattatatagaattagctgtgtatgaatagttgagttttacaatttatatttctcatgtaaactgctgcagaaaaaaagcagtcacaaatacaaatgtagtaaccaggataaaagaaaactgtgctcaaccatgcagggcaaagagatccaccttgttcttagtttccatgactgaaatttagaaacccaaaccttgcatacatatgtagcatctagagtagaggctcatccatgcttaactccaattcaccttacttccctgtatgcaagagccgtatgtgaggggacctacaggttatcctccctcagaggagccaggtttggggctggaggagcaacctaaaattaaggatgacagaattgggtaaggagaagtatcgggaatgaaacacgacttggatttgtgtcactgtacaatctcttatgggaatctagtcaggactctcagagtcaaccagatctatccctgcctctggttatgagcctagggtttatgtgggtcctaatgtcaactcttactgatgaagaaattgagacagcaaggtgactgtccagtttgtaagcagcagaggatacctagatccccagctctgaaaatagaatggtggtgtttctgctgcatcacatggggatttgtttttgttccccttgtttggaattctgaaatctagatgcatcccttcttgatttctgttgcatctctcggtgtagaaaccctggatagaacaaatgaaaaggagccaattacctatcctcttaccttaggccacaggctgttgccaaggggccttagggaatatgaacactcttcttctataggccagattcccccttttacattttctatgccttgctccaagggaactggataaattaagatattcatagtgccctgctatgagctgcctttcagtgggggaattcagcagtcatctggtaaactaaataaccgtaatatgcatcatcatccgaatcaccccaggatcctctgtgaagaggacagggtactcagatcctcagaggagagagggaccagttaaaggagtatgctttgtttcgcaggtctggccacatatatacccatgagcctgatgggcatgttaaatctaaggtttatgaagctgaatcttatttgctcctgttctctccagaatgcaatatgtgtatgaataaatggacacaaaatcaagcagtatatcactagcttgactaacgctatgaattttattctaggtctttaataacccaacacagagcaatggatttttatgctactgtctcaatgaaaaggatagtcccttaaagaaaaacaaaacccatctgttttaatatccttattttcctcaaccttgggctgaaatgaaatccctcttgtagattttaaatgttgacttctagatagcagggaagacagctaaggcattgtggaaacagcacataacctggaagaagacattagtttgaattttgtctctgcctcttgctaattggattatcttgggcaagtaatctttttgaatctcgcagggcttttgaaactataaatgaaataatttacatgaaaatgatttgtaaatttaacaagtttaaatgtgttacatgaacattagctgttcttgatattttatttctataatctatggaatctatcataccagacactgggttaagcttcgctgacccttgttggaatgtgatacttgacctcatgaaggctttacttgacctcatgaagcctgcagactagtcagggagacaggccatgggtactaacaattacagcagcgagggcagaggggctgtaagagttaggaaagacacaggtgctggacttgctacccaggttcccaatgaaagaacaaaacagaaaaggctgcttgataaagcatcataaagaaggtcccccacatcctccattaaggtgctggagctgcttaggaggtactcccagtggtgcacattcgttgctttacttcttttagccaagaggcttggccaaattggttgggctctgggactgtgagttccagctaggatgccaggtgggagggtgggaggaaagggagcctacaatggcgaagaagagcagggaacccagcgagtgagacctggatccaggaaacttccaaacacaaggaggcatgtggaaacagcgcttaacctggaaccggaagaggttagataaagggaggttagacgggggtttgttggcctatcctaccagaaatcaagctacatcgtcattctgggggccttataaagatgacataccccattcttcatagtctaatttacactgattatagtggagtcaaatgaagagaaactggtggcagtgtgcaggagttgctcctagttcacctgctccctttgagtcagtgcagagatggagtactcctccttttaagcctctgggagtcagggaagaactatgacttctcctagttagcctggatatttgtcattaaaaaaaatctactgaacatatactatgtggtaggcctattctagtctaggaagatagaaagttgagtaaggcacagaatgtttttgcaaaaagctcacatagaaggagagacatacagctgaccatagtaaaggtctgactgcaagatgagctctaaagggatggggaagaggtagactggaggccagaaggttggggtgcagtgatggtgggacccaaagagaagaggcaacatttcagcctggccttgaagaaggattttgactcaggcagataagcattgtgcactagccttgaacgcccatcctgccttttcagtaagtgtgggaaatgtgctgtagttgaagtgtggctgtggtgggctgtaggcaggcagggggtggatagggatggcaggaggagataaggcttgaagagaaaggtttggctacaactgtgtaagactttgaacgtcacgcttgaaggcttcatcctcttcattgagcagagggtgatggaagccatagaagaggggctaatagagtagaaagagatgaaatttagaagatctgagagttgtggttcctctgaggggctatgtgtccttggacacttgccctctcaaagggccacttaagtcactttagattcagttttctgagctggaaaatggatatgttggtcataatgcttatcctagatgctcaaggatgatcatgttcctccggtcgtagcctgcttcaattctcctctttcaaggtcttgctcaaaatatcaccttcttattaaacctccctggattcccccagggttgagaaatcaagacacagacctatgaaaaggtaaagtaacatataaaaatgccatttggctaggcaaatatgtggtgcatgaaggacttgggctcttacaagagaaaggcctgggttctaatcttggctctgtttcttacttaaactccatcaagttgcataacttttaagttaaggatgaaaatacctattctaccttcttctcagaatggttgtaaagattaaatgagcaaaatatatgaaggtgcttggtaaattaagatgtgctctacacatgttacttgccatggttagtactggaggtttggaagtggtaagatccagtgaatgaccttttaaaaagataacgttgatagtgtgagatgggtgaaaggaggagaaagagacaggaggttgagagaccagccgggtgctattgcagtggtccaggcagggaaggatgagatcatggatcaagatagtgaggatggagaggcagggtgaattcaagtgcttttatgaaggtagaaccaacaggacaatggtactaactggacaggagggattgaaagaagcaaaaatccaaaggtaagaattttggtggatggtgatgtcatgaaccaagccagccccttgttactttcaaatttctgaaattcagaaagtagaaaggaggcatcccagggcttgaattcagttatcctggccctcactggccctggtcactcttcattttgactctttccttcccttcccccatagcacctttagtagaacccaatgaacctgaagccaagcacaggagaatttgtccttccggtgtgcctttccctacaccttctgcctgattgtaagcaggtggctgtacccaaggacaccagctctattttggcaggagggccaggtgtgacacgaacaggtgtctgttggcattatggtagactggcgtcttccctttccctgcactgtagctggggcccatcccccagcccctcattcatttcttctttcctagacatgacagagaaactggcaggacttacagtgggtgctggactccctcagattcagtctgcagctctatttttttttaaacgtcttgctctgttgcccaggctggagtgcagtggcatgatcacagctcactgtaacctcgaattcctgggctcaaacagtccttccacctcagcttcccaaagtgctgggattacaggcatgagccactgtgcctggcctgcagctctttatggggatcacatttaataagtagaacagcttcccaggtagtaggagaacacctgagccatggctgggaggcactgcactggtaagggcatcctagcctggaagggtgtttggtgatgagagaggcattgctagaggtggcttctggaggaacctgttagcaaactgtgatttatttatccccattctttcacccaataaatttgatcctcctcttctctatcagggagcccttagtcctcttctcttctctttctcccatggagctgtagccttctcattcctgttgtcacacggagtggcattggccccctgagcccatcttgggctctatcttcttcctgaccctgaccttcacctgagtgttccctctgcctcatgatctcccctccaccccacccccaccaccttcccactggctttatgggagtcaggtgtccttctcacgtcccttcctttcttatttaactgacatcagtcaccttcgaatagcattttagcctttgaagtcatcaggctcattgatcttcagtggcagcttttattgagcactagagtacaggacagcagaggcaacacagcattgtggttagggttcaaatcccagcaaggcatttcacctcaagaaaccttggcttccccatctgttaaatgggaattttaatagtattaatacttcataggatggtcgtgaggatgaaatgagttaatgggtgtaaaaaccttgatacagggccaacacatcataattggtcaatatacgttaatcactattgttatcaaaaggagaaagagtagctgtgcccttcagagggttaagggtttttgttgtagctgaagaggtggaacatggcattttgaaacctagtttctcacatggctaagaacatacctttcaaaacagagcaagcaatcagttggtcctgactggaatgcagctagtctgggaaggcttcctttgtgaggctgaatgaggtgtgtttctgtgtaacattgtaaggaggtcatatttgcagcctgggtcaggggaaagggtacatgggcttaatagaggtacttgctcagatgctctctctctgttgcttgattcactctttcccttagtcatggccctgtccaaacccagtgaatcttatccttcttgtccacagggaatttgccaaagagagagagagagtggagaaccgaagggctttcatgaagctgcggcgccagcagcagattgagcgtgagctgaatggctaccgtgcctggatagacaaagcaggtaggcctggggggctgcaggaggctggtgagtgggctgcagagacatcagggccggcccctcactcccaatgctcccattcaaggggcagcctagacaagacaagagagacactctggatgcttggttggctcttaaggttccctgctcatccgactttcttcctctggggtctaactgtcctgtctatcaaactgtcccaacaccttaaggcaggcatcttagcaaggtgaactgagtaaaagtaacataacccaatcctggagctgagactgggctgatggcgttttgtaataccgttcctggtgctcacagcagtccattcattcagcaaatatttattgagtgcctactttgtgccagaccctgttctaagcacttgggatatggcagtgagccaaacagtcaaccagctcaccaaagctcttctcttgtaaagctctctagttggctaaggcagcgataaacaaaataataaatgagtaacttataagacaatgataaggtggtaaatatgatgggaaaactgatcaagttaggggtatgggatatagaatgtgccacagttttaaataggaggtcagggtgggcccattggtgtgtagacttgaagaaatgaaggagtgagccagaagaagttctgggagaggagtatttcagcgccaagtacctaacatgggagtgagctggggtgcccaaggagcagaagggggaaggaatagggaggaggaacaggagacagagtgacagctgtcatgggggaagtgggcagcaatcgtgtttgaccttatggggccttgtaagggctatgggcttcactctgagtgacacaagaaccatgggagggttttgagcagaggactgacgtgctggccgcattgagaatagaccatagaaggataaggctggaagcagagggactagtagtgccgccatctagggaggagataatggtgagaacaggtgttttcctaagccttgagctgtcatcagttcttaccctgtgactcaacattaggaatagttctcagctgcctgtgagaataggtccaaacctatcatgatttcattaacccacagagccaccagattcaagtttggctgtggctcagatgcttatgaagggcatcaatcacccccatatttgtcaataaaagggacgggtttgctttctttattattttaaaggttggtttgcattagtattatatatcttcattttcttccagaggaacaagtgatttcttaaataaaaactacacgtatgacagtatcttttctctattcctaatagaaaacatagcacaaaagtgaggtcacagaggaaaaatttggagtttgatttagtgcttagttgcttgagccttattcttctgtaggagctttggaatgacactataacacttactgtgactgccaacacacaaaaaccctctctaagctctgcagtcaacttttggtgacctccaagggttgagagggtacctgtatgattgcgatctgcactcccttgtagcctctggaaacatgagcaatgtgtgttgactatacttgcatttcgccctttctcctccaaggctgttgtgtagggatgaagtggacacaaatatcccctaccgcttcccagaatggtaactcaggcttaccatgggaggtcaagcagatttgcctctaggccaggaaggcagcttgatggtcccagctgtccttggctttctcggcggaggagccatctgacagaccactaagagagctggcagcagacccaggaaggagcccgcccagccttggccaccccacacaggtcaggtggcagggtatgctgctcgctggggctctgcttttcaaatacttgcagaattccaaggcttccctttcttccagttggcaaagccagctctctcctccttctaagaaaaaagacgcactgcgacgtcaaagtgtgcttcctggcccttccctttacaaatggagcgccagtgaatcagagacagatgggttacatttccctggaaagacactcaagttctaaagcgaacttggcaaaaggcatggggtgaggaggaagggggatggcttcagcaaatccagagcccttgagtgcttcccagagatctcggcagcaccacacaccttccatctgtcctggggggtccccagatctgctcaccccaaagcccagacactgtgcacagcaaaagtgacttgactgtctggctaagataattaaagttgctatgaggtattttaacaagttcctaatttttaaatgatgccctccaaacacgtgctataaaatgacttaaaaaccctttatgtctgcaggaaggagtgccccaccaataacacttaacctgttaatttagcgttttgccagaggctatacttaaaaaagaaagcaaacatttatgactttgtaataatggccatccggtgagtaccatcccagccttaaaatgttcccctccctaggaaatacattatgtactctcagttttatctgtagctggaattacggtaatgactttaacctctcctactgtccttttacttgttaaaagtgtttaaattaaaccattgtttagtagggtctgaagctagctttcccccagcagctgggatcttagggaatgtttaacgaggcctctggctccctggcctatgggttgagctcaaactcatcccgttactcctcatagggcatgcaggatcccaccagacttgggagagaagggctattttgttgatgcacttggagggatgctagtgaggtttggtctaaaagtcttagtagaaaatattccccttcagatgatgacacctcagtagagtatgggactgctcctggggacaccaagtgggaagagtacaggggactgtctggtgtcattttagaactccaacaagcaaatatattatttcatcatcaaccagtccttcagttctctaacaccaactaggtgttcaacaatcagttaaattctaacacgaaatactacctcaaattagcatagaccccacaggttaaaggctcggttccacaggactgcccccactttagatggcagccaaaagtgggatctccaggcaaccaacatatctgcctggctgactacaaatctggggttcccacaaccatcaccccactccccactggttcagtaatttgttagaatgactcacagaactttggcaaaaccatactgtattataaaggatacaactcaggaacagcccaatggaagaggtatatagggcagggtatggtggtggggagcacagagcttcatgtcctctctgggaacaccaccctcccagctcactgatgtgtttaccaacccagatgcctcctgaaccccaacatgctgaaccccaacatttagcatgcccatcattacataggcatgctcgattaaaccatcggccattggcaattaaactaatctctagtgcccctcctccctagaagtgggagtagggggaggctgaaagttctagcctccagtcctgtggctgtttgttctggctacaagctacctcctctaacctatccagggcccctctctcctccatgagtcatttcattagcatatgaaagactgccaggaaccagagacaaaaaccaaatactttttaaattttatcttagggacaaattcatgattggcccaagcctctttggctcaggctctggtcaaccaacaaaggatggaagccatggggacaggaggaaacccacaagcccccctcctgtctccaaggacctttgggcatcttcctctgactcctcctcagagacatagaataaagcccaaaacatgggctcagctcctgaatgagggtgtagatgttataacccatggccactggcaagagaagctaaggaagctgttgctgctagaagttcaaggagttaggaaagacaggaagctgggtggaattaaaaacagaaatggaaatttttcattcctatcaaggattttagcttcttcctctcttctcacaggtatcctcctgaacaggagtatcagacacagagccgattgttaccccaaacaccccctccccgaggcttcctttctgttctcaggagctctctgtgcaccctctgtgacacttgctttctttctgatgctggtgcctgtgacaggctctgaactctgctctctctctgttgccctgagctgaagttgtccctgagggattttaatcttgcagaataatttggcatttacagataatttaccaaaccatttgtttccatatagaggaagtcatgctcgctgaagaaaataaaaatgctggaacatccgccttagaaggtaaggaaatgttctgatgccttattccagttgcatttgcccctcttaggcgatggcaatctctgttattcaaaaggagagaaagaaatgaaagatggtgttctgggattggaaatgagagtctttctgtcataaaatccctcatgctttaaaatgaagggaattgagtcacagatttaaatgccttttaaagtgatgaaaatgaaacccaagagttgctttgttccagggcatgtgattgatactgagcaaggaaaaggccatcctacaaccaatgctatctaaagggaccttctcttaaaatgtgtggggatcaccttgagaccactttcattaccaggaagtggcattgtagatgaagagccaggacagatggatacggagtgcctgtttacctcctgcatttagataggctctagcatggcttccagagctcttgtgttgcaggaaggtgctggtgagcacagcatttgcggtccggtagacatccgtgatttctgttaccctggctcaggtattaaaggcagatagatgcctgtgttacaggggcctcacacaaggcatcttgcctgcattcctcaaaattttgtccagaatggtctgggtgtacttgtggcctctcactggtcttccctttccctgatgcagtgcttcgaagggcaaccatcaagaggagccggacagaggccatgactcgagactccagtgatgagcactgtgttgatatctcctctgtgggtgagtggatccagttagatcttttactgctctgaatctcccacgaaaaggaagatcctgtcttttgagaagcaccacaaggagggaaagaatccaaagggtccagaatttaggaatgtaattaaggaaaagggtggaaatcgaatctagattacaatgatttatttaaaaaaaaaaaaaaaaggacctggggatgctatttattcacacgaaacatgggatttagggctaagaatccaacccaagtttttcaggtgtggcagatgtattccatttgcagaagtatccaccctctcctgggagtgatgatgagaacccactatgggacattgttcaaaggatcctgaggacctgttgcttccagggacacggatgtgagatcttgaagccatttgcttaacaacagtagcccccacctacttccatcatgtgaaatttaaactaattctgattggcaattatttaacattatgtgttccatctcaggtgctcctagagattctggctgatggcaggtttttcctccccagaaaaagggaaaggtcttgttccatcctcaaaagcagaagagacttacaaagctcattgctgttttgtgccaccagtggtagaaatatcaccagtgtagcagaagaattccagtgcttgaagctattttaaaaggaaagggcagaaagaagcccaatctgttaaaaacataaacacgatcctattaagattcaagacactggtgtcctgtctggggaatctttccatttcttaggactgagagtgcccagagaggaaaaacagggtcactgcctatagaaactactgagcccgtaagatggggattccccacacctgcaatgtggcagtcaccttgccctgggactagagcagcccatcttgcccttcgaatgctccctggcccggaccacaggatattttgcagtctcattcttccttacttctccctcttaggcacacctctggcccgagccagtatcaaaagtgcaaaggtagacggggtctcttatttccggcacaaggaaaggcttctgcgcatctccattcgccacatggttaaatcccaggtgttttactggattgtgctgagccttgtggcactcaacactgcctgtgtggccattgtccatcacaaccagccccagtggctcacccacctcctctgtaagtaaagcctctctctaaagcctcctctgctggtccccatgtggggcagcttgatgtgtgtgtgaacgcaagacagcaaagcaccctgctaggaaaggttctacctcttcacgctgtgagggaggccacatcgtcctcaagggggctggagtatctcatgactgtttccagctttcattctttaggtaaacagatcattgttgatgaatcaacaagatagcataacgttatacctttgggtaccataaagccttcacttcctttcttaaggaggctcaatgatcaggagttttgatcattgaaatcctgggcaggaagttctcagggcaatggagacctcaaatagaccagaagaagagcttataggtcagctccagattagactgccactgggtgtgagtgagggtcaggggcctgtccctgccaggcatgtagggaggaatccagctctttgatcaaagccatagtaagtcctctctttccccctgagggccctctaccatataaagaccagtgacaggcctacctattgaaagagagcaatgctgatctcttgagtgcacctgggactcggcctgggtcagagggtactcggacatcattaggctctgtccagccctggcctgatgtggccaccgaatgtcctgacgtgtgttgttgtgagatcctctgtaggtgggtgtgttagctgagaagtgcatgagcccaccccacatgtggaaccaatgctctacttttaatacttccagactatgcagaatttctgtttctgggactcttcctcttggagatgtccctgaagatgtatggcatggggcctcgcctttattttcactcttcattcaactgctttgattttggggtaagtcctcggaagcctgcctctgctcctgcttcgtgttgatatgccctggttttagataagcagcttgctccttactcagcatgaggcactgaaatcagaatatgtaaaagcggaatagataagattagctaaagggaattcagaagcgagtgaatccttcccatgcagggtttgtttgtttttctgagctctttgattttcaatatttttattaaaatgtaacacatacattatagagggtacacttaagtgtatagctccgtgagagtttacaaagctacccatagccagagttttgaaccacttattatcttgggggaagcctgaaaaggacaaaggacttgattttagaggtggttccataggaaagagaagcttatatatttgtttttctacttcagtttaaaattgggataattatctagatagaccctcattcaaacacacacacacacacacacacacacacacacacacacacacacacacacacacacccttatattagcaagtcctcacagagaatatctcagtcagctgtttactttctacatagcatggatatctaaatgtatacattgtgctaacacttcaaggtgctttcacgtatcttttatttttgtcccctgccgcttacaggagtcctatgaactacattacatttcaggagttagccttcccatttacacaagaataaatagaagctaccgtgcccaagttcatatacccagttagcagcagaactgggtcgcagaactttgggctcctgaaccacttctctttctgtcaatcccactactttttctgccaaagcttcagttaggtgctaaagattttgaacacttgctaatctacattttaacttggaacatatggttctgagtacgggcaattttcaggcataacagctagtgagagatcactttaacctcagtttctttgtgtccgtacctttcggcattgctgtcaggattaatagttgttgtttctcctagcacaatatctagaacatagtggacattcaataaatatataattaaaataaaagaaatagaaatgttcatctgaaattgctgcatcttgcagcaatcagatcctacatcaccatgaactgtcacattgcgggatgcaagacctccatgactgaaagatatttattatatcaaggaccaaaacattcttgttagcactaaattttaggatgatgagagaatgtagaccttctctgagatttctgtattgagaagcaacttgtactaatcagtttccttggtttgagtaccactcctttgtcagagcagcagaagcagcaactggctgttgtagttttcaccaaggacaggagtcagtaagccaatctacagtgtgaaggattaaagttaggaaggggattggagagcaatgggagagaggtggcagcttcccacataggtagttctactgaaggtagggctggtgggagaggagagtttttatttccccatcccccactgagagctgttgatggtgtgctgggcgctagaatgccccctcttctcctcttcctcctcctctcactgtggctggcattgcctctctaggtcacagtgggcagtatctttgaagtggtctgggcaatcttcagacctggtacgtcttttggaatcagtgtcttgcgagccctccggcttctaagaatatttaaaataaccaagtaagtgatcagaatttggacttttcccaatgtctttgagagtagaaccttttttctgccttatattttcttccatcttctctttcccccttagggggaaagtatcccttccctgccccaccccttttctattctttagctcttcctttttctccaaagattaaaccaaaaatatctatggtgccacattcccaaggggagcaataggtttctgccctctttacttcctacaaatatacaaatgcagcttatttcatagactaccaggcatatgctgagctgggcttggtgggtgacttggtatgcagtgttcacagctgtcacattgtctgggttttgtaggtattgggcttccctacggaatttggtggtctccttgatgagctcaatgaagtctatcatcagtttgcttttcctcctcttcctcttcatcgttgtctttgctctcctaggaatgcagttatttggaggcaggtaagtgcccagaagctttccatccaaaggaggctcaaaacccagtcgtagcctgtgttgggctagggtcattaactcaatcaccatgttactatcctgtctgcctttgcccatggcctgaattaaccactgagtgagttcatatgtggagtaaacgtctctgcttttattcctttcatgctgtacagggttctcattccggggacccatctctttggtgctgtccctgaaatgtgcagcgtgggcacattcttcaaagtgcatagtttatcagtagtagtcactgttacagtctttgtaagttatgtggaatggggaaaaagtagggaagaggggggttgtagaagaaaggagaaaagaagtgatgaaagctgtgatcttggggaatggaaaacttggtatgtgagattttcatttcattattttctctaattttgtttttcaggtttaactttaatgatgggactccttcggcaaattttgataccttccctgcagccatcatgactgtgttccaggtatgaggccagctgacggttcacaagtgctgcatggggtcccttggactgcacactgcaagacaaggatgagtttcaggataattctgcttttcctttccaggctcctcccaggggattgaggcactctttctagttgagcggtcattactacaataatccctagaacttctgtggctttgttcttaccaatagtaagagagctctgttgggaccatctcactgtccttctctcacacctgtgagtttgcaggagacactgagtctgaggcattcagccaagaatcacatctatggttttctgaaatctaggggcatcttctaacccatttaatgaggtatccattaaatggtgtttatttaacaaggtctcttttccatccctactccccccaaaactcaaccgtttaaatcatggggaaaactcaaaatcaatagtgtcttaggcctaaagaaaaatactgtttggccagaatctgaggttggaccacaacccgtttcctgaactgcagcccacaaggctctttccaatcatgctgctgttccagaccctgtatctgggcagctctgaggacagttaggtaatgaccagaccacctgatctgtgtcatttccacaaggaccttgcaaaactggaggtgggagacactctgtagttggaggaacagaatctttccctttgatgctctccttccattttcaatgcctaaaattcttttccatacgaaaaaaaagtttaggattatttatggaaatgactttttttttttttaactccctggcaagattgtcaagcaagggggtagatgcaaaagacccaggcccagaatttgcccttggcattggccccattttctcctccagcccaggtttctgatgcgcctgtcatttgctttttgtagatcctgacgggtgaggactggaatgaggtgatgtacaatgggatccgctcccagggtggggtcagctcaggcatgtggtctgccatctacttcattgtgctcaccttgtttggcaactgtatcctttttaagatgcacctcctcaagctgcctgccttcctggaccagcatttgaggaggcattggtggtggtggtgctagagcttgggttggtgggacaggggcgtggacattgtttggtgtactaaagtaaataaggatcctgatctgaaggactttatgtactagttgggtaaagaatacaaacgtaaacaagatagagtattatccaaatctgtagtgtatgcaaagaataacataggaggctgttacattgaatggttggaggtactatgagctggggaacattagacaaagcagagatcactgtaggctgaaagaggcacattataccactaatgaattaattacatgctaatgtagaacagagcctgccacatagtaagatcccaaaaaattagtgttaggattaatgctattactgctaattatagcaaatatgtattgtatttgggctatacgtgagaccttaaactaagtgcttcataggcactatttcatctaatccttacaagacagagaaaaaaatatctcgagtaaaataactactaaattgtaaagggaaactaaagtccagttccatctaactccagtgccctatccaatcacaagatctagaacaggaaatttaggttttaatcccagcaactctgtgtatcagctgtgtggccttgggaaagttacttaatgactccaagcttctattttttacaactgaaaggagaataataatatttatctcctttgttcgtggtgaatactaaatgagataatttatttgcatgtgatttataattacaaacttctatacaactgttagatgcttttggggagttgggttggccgtgaattgggattagtagaacagaaaggcagaaccatgggacgcaggtgtatttttgcattttccatagtttcatagagaagacatgctgttttacgttttctaccctgaaaacatctagaggttgggacagactagaagctcaatatgagaaactcatgaaaagaacactaggcagtaagtcacagacatggaagctccatgtgtcccaatggcaccatcattttcctgatattctgggggtagtcagagctgggctttgatgctagaacagttctatgttccacaacacataggctttgaagagagttggaaattgagacttcaggcactagagtatggcataggaatagatttcatagtgaatcatgtctgctgtgtcacattttgttaaatgaaatgtggaacccttcaggaccctcacaagaagaatgggagaagttagcatctcattattgggagatgctcagtaacaggggctctggaatctcattctttttgtcgttaaggacagaatggtgtgacgcccattggtctaggtaggattcaattccagcctcccagaatggggagatgagctcccatactgagctccctacacatctcgttcagtgattctcttagttgttattgctatgggtagaggccacagctgtctaaagaccttttgaatgtggctgaacaaactcaaagtgctttttctgttcccttactcatcaacaattaatgcagaagacttctgtaaccaaatgcgtgggtttttttactcaccaacaagcaagcaatccggcagtggatactaattggtgtcctctaattcaattctgacgctatctacctggagatagcatcagatcccacaggtcgatggctcaatccccaagactgcccctgccttacgatgacgattgcatgcctcaggttactttacctgtgttttgaaggctataattcggggttcccacaacccccttcctgggtttggttaatttgctagaatggctcacagaactcaggaaaacacatttactggtttattataaaggatattacaaaggatgcagttgaagaggggcagagggaaaggcatggggatgggcacagaacattcatatcctctccgggagtgccagtctccaggaacctccacatgttcagctatccagaagctctccgaaccctgtccttttggattgttatggagtcttcattacataggcatgattgattaagccattggtcattggtgatcaacttaaccttcagcccctcacccctccccaggggttgtgggggtagggctgaaagttccaactctctaatcatgccttggtttggtgaccagcccccatccagaagctacctaggggctaccagataacactttggagtttctaaggatttaaagagttgtatgccaggaaacacagttaaagaccaaataataatttttcacagtatcgtaattttcctcaccccatctggcccccagatggtttgattcaagtatttctttatcctgggtaaagagatgatatgcagaaggagggaagaaatatcctctttctcctttcaacagagttgtacaacatctccctctctgttctcacagcccctgcttaagtgactcttcagggtagcttctgttcctgttaatgtcccaggcaggaaagattatcaggtggcctctcagccttgctgaagacttttgcttttcttatttgcccatccttaattcatcaccccagacacgctactgaatgtgttcttggctatcgctgtggataatctcgccaacgcccaggaactgaccaaggtaagcattgttttctggggatctgatgtttctctagtgccattgggtaccctttggcctttggaactctctcccaaagtctacattgtctgactcaggcctgccaggaaggccctttctggaaacttctggacagttggagagccacacacccatgacggaaggctggttcacttttattgagtttggtgagcctcaacctagcccagggggcctcaaggaacacagaaaataacatcttaatttctatgagccctcaaaggagtcctttccaggatcatcatggagagtcaagaaaattctaaagccctggttttaagttccacctctgctactgcaacctgcggctgtgtgacctgaatcacatgacttaacccttttgggttttggtgggagagagatcagggccatcacagttcctgggctatggctgttgggatattccagtaggcaaaggtcattttggggaaatttcaatgaagccagatactaaatttctcacagaactgttcccttcttttctctgattaatttccccagtgtggggaggtaatattaacagcagtgggatggtctacagagatgagtaaaaacccttctcttcacagagggtgccaatttggttttgggcagaggtgcatagcatcctgctgacatttctgagcttcttccatgcattctctgatgatctttctacatccttgagggtcttcttatctgcatatatggtaggaaaaatatcagctttagtagctgagaaactgggtctgagtcccacacctgccattggctgtgttggctttgcttggactcctgatctctattagcattggtttcttcatgcatgagacaggaatgccatatctgcattgtgtaccttacaggattactgtgaggatcaagtaaaataacgtctgtgaaaaccatagcatgctctgaagatgtatgtgctcttattagctctagtcattttacctgagctggttttccttgggttcatcacatagaggggacacttgcaggaatgctgctgaagggatgagatcttggcctaagcacccacttagctgtgcaaagaagacactacaatggggcactcagcctcagcactttacttggcggggtccttgcctggaaggcccctgctccatcacttccagacactgtaggacatctgggaagtgtcagctcctgccactgacctccacagccatagccagctccactgagggctaggggttggggtagacttctcctggttctcatgagcaacctgtggatggctccaggatggagacagggattgctggccacgctatagctgtgagactactgactcccaaggggcctggcctctggccatcagaagtctctgagccaacctaacatctcgctgtcttgtttatcctcttcctgtgtcttcctcacttcacttggtattcagaactcctccttaggagagcagccaagggaagctactctccttcctggggatcccaggcaaagccatctctgctttgtgtctaggatgaacaggaggaagaagaggccttcaaccagaaacatgcactgcagaaggccaaggaggtcagcccgatgtctgcacccaacatgccttcgatcgagtgagtcagctgcccccttcactgatccctgagctcctgtgctaacagccaattcatcaactcacagaactattggttataggagtgtacctactacatgctgggaactgttcctgagaatacagcagtgagccagacagagtctgttttcatggaagtgttatttcagtgagtgagatagataataaacatgcacatcatttcagatagtgacaggtgctataagtaaatgaaacagggtcctatggtggagaagtacaggagctgggtgggagcagcttatgtcaagccagaagggattctctgaaggggagctgtttaagccaagacctaagtgtgtagatgacagtcatgtgacattttgaaggaagagtgttccccagcaaggttcagtgtgactggtgtgtaattaatgaggggaaatagagaaagggccagggagggggcaggggccaactcggaggtccttaaagtccaggtggaagagtttagcttttattctagctgaaatcacaagaggacttcaagtggaaggatgaataggatatgatttacacttttaaaaaggtcactctgttctatggagcataatggactgtaggggccagagtggaggcagggaaagagtctgctctcagagtaaagtaggtgagaggtaatgggggtttagactagggtgggggaagtcaaggagatgagtaatcccattcagtcggtagtttggagagagagccaataggatgagctcatggattaaatgtggcaggggtgaggatgaataaaagggaagaaacaaaaatcgatcccaggttttaaggttttgtggactaagcaacgggttggggagtggtggtagttactgtatccctggaaactgttggaaatctaaagttcattttgagatacttctaaggcatccaagtattgaactggctattggttacctgcatctggagctcagaaaagtcagaattaaaacaatgattggggaaggttgttcgcatttagatggcatttaagtcattagtatgggtcagatgacccagagacccagctgctgaggacagaggctgacagcgctcctcctgcttaagaggagaaatcagctaaggagaccaagggagtgcagccgggaggcaagagaaagaacaggaggtatagtgtgctggaaacctgtgaaggaaaactgcaggaaggaggagtgggtgccggtgctacatactgtagaaaaatcacatacaatgaggaacagaaaagggaccactgcatatggcaaaatgaaagctgttagtgaccttacaagagccattttcgtggccaggttggaacagaacccagttgaagtggactagggagagaacaggatgtgataaaggagagtggtgagtccactgcttcagggatctagcctggacctgtggtagagctacaggtagtcggcctgggccctgcgtggcctggtctctgcgtggtgacacagaggggtgttggagaagaggctgggaagtgaccatagaaccacataactcctgttgttgcatcggggcctgcatgaggactgtgtgagtggtgagtggtgctggggcatctgtgggagggtccgagacccccaagggggtagaagtctatcctggcaatgaccctgtcattgttacttgaagctagtaagggaagagcccttggttggctagagttccagtgaagggctcccaggcagcctcttccttgccttgtggggtgtgccagggttgtgtgttgaagcgggggacctccctcctgcacggccatcatgttgcctttgcctttcgtaacaaatgcctggcccctggatccctcttctgtgagtgaaagagaaaaattcccttccaaatcgttaaaggttgatagggaaatgccaaagattgatagggaatattcctctctggaatattctctgggccttgagtaatttctactccaccttccctgaactcatgagtttgggttaaaaacacatacacacaggtatccaaaaatgtggatgggtaggactggctgtcacttaggagtgggtggttctatttactgagatgaggaagcctgggggagaagtgggtttagagagatgtgagttgggacaacgcttggcccagagtagaaactcactatttctggaatgaaagaatgaatgaaatgtgggtaggcacaggcagggccgtgggaattgagcagagtgtgcatcagggcacagtgaggtggaaggacgtgctgcaaacatccaagaccagcagagacccgggctttggtgctgtacatgtgctgtgaggttggcgttgctggtgtgagccacctccgggtgtgtgtgccccgctcagctgtgtacactctgctcaggtatgtaccctgcacagatgtgtgtgccctgcaaagacgtgtgcaccctgctcgtgtgcgtactctgcccaggtgtatgtgccctgcacaggtgtgtctacattgcttaggtgtgtgtgtcctacataggtgtgtgtcctctgcccaggtgtgtgtgccctacacaggtgtgtgtgctctgcacaggtatgtgtacaatgctcaggtgtgtgtgcattttgctcgggtgtgtgtgccctgctcagctatgtgtgccctgcacagatgtgtgaacatcgctcaggtgtatgtaccctgctcacgtgtgtgtacactgctcaggtgtgtgtgcattttgctcgggtgtgtgtgccctgctcagctgtgtgtgccctgcacagatgtgtgaacattgctcaggtgtgtgtgccctgctcaggtgtgtgtacactgctcaggtgtgtgtgcattttgctcgggtgtgtgtgccctgctcagctgtgtgtgccctgcacagatgtgtgaacattgctcaggtgtgtgtgccctgctcaggtgtgtgtacactgctcaggtgtgtgtgcattttgctcgggtgtgtgtgccctgctcagctgtgtgtgccctgcacagatgtgtgaacattgctcaggtgtgtgtgcactgctcaggtgtgtgtgcattttgctcgggtgtgtgtgccctgctcagctgtgtgtgccctgcacagatgtgtgtacactgctcaggtgtatgtgccctgctaaggtgtgtgtgctctgcacaggtgtgtgtgccctgcaccagtgtgcgtacattgcttaggtgtgtgtgctctgctcagttgtatatgccttgctcaggtgttcatgccctgcttgggtgttaaggcgaaactgctgatttccgactacactttaagtgcaaacatggctatccatgaagaaacacagaagaagcactgttaaaaagcaaagtgcctgagtgctagttatatttgtctcactaatataccctgtgacctcagagagaaaaccactccgatctcagaacctctatttcctcatctttgaaatgagaagaatgccacctgcccttcctatcccacaagggctattgtgaggcgtacacaaggtctcattcatatgagttggagacatgtggatgcttctctgtatgattttaggtatgaatgtaagtttgaatctgtgcatatgtgagtagagagaatgctcatgcttgtgtgtgtgagagaatccttccacgtacgtacactcttacacacatgcttctggatagctggtatttgaatatttgagaatttgcaaatagatggtgtgatgtgcttttcctagcagatgtgcatgctgcctgtctaaagcgtacgcttctacttctgtatctacccatgcttcttggctctcccgcccccacctgtgccttgttgcattgcaggtcactgatgctgagggttgtattcagttgaggagctcacaggcttctccacaatgatgtctgcatcagtgggtgctcctgggtggccacacacatgtgcactgtgcatcttccagacacccagagtgggcctcagaccaactgcctctgctccctcagtcccacccttgtgtggggctcttctgcagacatgtgaaagatggcagttgagggggattaatttgcctagcatgttctccgtgggtgggcatcagctttatcaggaaaggatcagcatttgccaacatcccaggtccaagcagggcccactgggctggactgagttcatcaggccagtaactggggcaggctcactgcaaggatagcccagatgtgttgtcctctagctgagcattgaacctgtgctgacagcttatttaccaggcatcctgtctgtttttgcgggaacagttcatacgttgccattctaaccttgtgtttgtaaggacacaacatgcatatggaagagagttttctctgtacaaggctaagaaggtcaatactctgctctgcccaggtgaacatagaacagggtctatggccagggcctctgcgttgctcaaaggcagaggtcactgctcacatcctggagtacatggatggtggcctacggaaagatggtgctgcctctgaccatggaccacttcgtagccttgacatcgtgcatggcagagcacttgctccgctgcatgttttgtgaagctgggtcaggttctgctatgggagtcatgagctggggagccacacccaatgaatgtgctatgctagccctagaaatgactcgggggaggggaagaaaactactcagcaacatctacaggatttccaaaataggaatctgaaggatgtgtaggtggaagtttgcgtgcctgtgaggcatggtgtttgagcatctggagctgtggatcatgtgaaatggcataacctgtgtgcctctgcatgtgtgcttcaaaaactagatccatgtatttgcacatagcaaggaatcgaaagtcactccattggagaatcgaatgtggggagtctacagaaggcaagcaggcacatggagacctgatggccacacagaggactccctgtctccctctggaaatctgctggtggctgtggggcttgaggttcctagaggttggggtgaactgaacctgtccatttttcttccccagaagagacagaaggagaagacaccacatgtcgatgtgggagccacgcagcagccacctgtatgtgtgtaccagtttgcgtgtttgtgagtggttacgtgtgggcgtgggacaatgtgtcattgtccttgccatagacaaagtggcactgggtgtgcatgtcagtgtgtggcttggtgtgtgtgtgtgtgttccgttcacatgatctgtggatatgccctctgcacctctcaacatttgcttatatcagcgtgtgtctacctttgtgaactgtgtgtttttcgctcttcagtctggcctgtgagtgggtatatgttgtgttagtgttggtgggtatacctctcacgtaggtagttgtgtacagctatgtgtgggcctcagcgaggatgcgtgtgggtacatgcgcgtgtccccttcacagtttgtaggtgtgcgcccacaggcacaggctcagggaggaggtaacttcccctccgcccagcgagccctctcccatgtgctctcctgcacttgtcatgttcatgatttcccgctgccccatgaatgctcctctaggcccctgggctgaaatgctcgatcgcagttttgagtatgagctgctggtggtctctgcacttagccttctctggcttttattagctattgtggaagagactcctagcactcttacttttgagggtgatatcaagactttttgtaataagtctgcctggcactcttcttacccttcaatggtatctgaccatttcagccctcattatcccgggctgtaacctgagagggaagggagatgagggggagaggaggaggaaagacctttgaccttgaatcaagggccgttgagtgtgtacaagcagatgccccgaaagcaaggagagcaggggagtgaagacgtggtaagcctgtggatggctgccccagcaggccctggggacttggaactcctcccagggttgatgcctacccagccctcagctactacaaagcagggattggagcagaaagtacctgggctgggaggcacctgcctgatgagctcctcacgtgtggcccgcctgctcctcgcatctttctgtgcttcctgtctgcaggtcctgggcactcccatttgcccccaccatgtgtcctgccctctcacatggcccctgtggccaccctccctgcctgcagcttctgggctctgaccgcggccctgccctttccccttggcaggagggagcggaggcgccggcaccacatgtccgtgtgggagcagcgtaccagccagctgaggaagcacatgcagatgtccagccaggaggccctcaacagagaggaggcgccgaccatgaacccgctcaaccccctcaacccgctcagctccctcaacccgctcaatgcccaccccagcctttatcggcgacccagggccattgagggcctggccctgggcctggccctggagaagttcgaggaggagcgcatcagccgtggggggtccctcaagggggatggaggggaccgatccagtgccctggacaaccagaggacccctttgtccctgggccagcgggagccaccatggctggccaggccctgtcatggaaactgtgacccgactcagcaggaggcagggggaggagaggctgtggtgacctttgaggaccgggccaggcacaggcagagccaacggcgcagccggcatcgccgcgtcaggacagaaggcaaggagtcctcttcagcctcccggagcaggtctgccagccaggaacgcagtctggatgaagccatgcccactgaaggggagaaggaccatgagctcaggggcaaccatggtgccaaggagccaacgatccaagaagagagagcccaggatttaaggaggtgagtgagtcacagggctcccagatggatggcacacaggctgctgttaggtgttcctcaatataagcctttctgagctccagtttcttctcctattataaaatggaaatgatgctgacacacactttgtgaggtatgaataaatataacaggcagtgggctctgtccccccaaaaacgagggcctgttggaagtgggtcgtggatagaaggatgggaataaggcagtggccatggcttgtgggtcttagcacctctctgcctgtctggttggggtggaaggcagtggtggccttgtaccttccaggctgcctgagcttccccgccttccccttgtgccaggcacacctgccatttggggacagcgtctgagcaccagctctctcttcctctctcttcacaggaccaacagtctgatggtgtccagaggctccgggctggcaggaggccttgatgaggctgacacccccctagtcctgccccatcctgagctggaagtggggaagcacgtggtgctgacggagcaggagccagaaggcagcagtgagcaggccctgctggggaatgtgcagctagacatgggccgggtcatcagccagagcgagcctgacctctcctgcatcacggccaacacggacaaggccaccaccgagagcaccagcgtcaccgtcgccatccccgacgtggaccccttggtggactcaaccgtggtgcacagtgagagcacagtccctgttcccctccacccccaactcctatcccatctggggctggggccatgacaataaagccacatggaaagcaccaccaggaggagtaaatcatccttcaagaagtaaaaatgagtggcggttttctcccagtgtgcagaacaaaaataagctagcgttctcttcatcttaaatttttcccataaaatttccccaggcttgttcctgtgaccaccctcaagtcttcagagtgatcacttgtgactttgtgcccagttagatattcagctgtttgctttggtgcatgaatatttgatggtgttgtctggggtctcccaggtgctctgctgccctggcaagttagggagcctctgatggagtggaccatggctctgctcactgagtgatcttggaaaaatctctgcatctcttgaggcctcagtttgtcatctgtaaagtgagagcattgtactagatgatctctgaggcctttccctgtactaacattttatatgattctattgctcttatcaactctttttctcctaggagcttttagccacaagttctccccatcacagttcccttaggcaacaaatgttaatcaatggtgtcctaaagggaaacacagccaaaaaaaaaagcacttccccacccctgccctgaccctacatcccatccctgtattcatcctaccccttatccttgccctgaccccataccccatccctgccctgaccccacagctcatccctgcattatgaattccacaccttatccttgccctgaccccataccccatccctgccctgaccccacacctcatccctgcattatgaattctacaccctatccttgccctgaccccacaccccatccctgcgctgaccccacacctcatccctgcattatgaattccacaccctacccttgccctgaccccatacccgatccctgccctgaccccacacctcatccctgcattatgaattccacaccctatccttgccctgaccccataccccatccctgccctgaccccacacctcatccctgcattatgaattccacaccctatccttgccctgaccccacaccccatccctgcgctgaccccacacctcatccctgcattatgaattccacaccctatccttgccctgaccccataccccatccctgctctggcctcatgatctctgtgcattaatcccacctgctgccccgtgatcactgaattgtgaccacaggattccagccttgctgttttcctctactttttctgtatttactctttcacatgaaaatcttttccctccctgtttttctttcttccatggctccctctccatttccgcatcttctctatagtcaacgtgccactgctacttcagaaagtgcaatctcccatgtccagtgcatgcttcagttgacttgggcatgtctcaggatcccagacccacagctcttttggtgtttgtttgctttaatacataagaagtgttttgggccttcttttatgagaaagaacataaagctttactctccctctgttgtaattccagagctagtctttggtcttggtcataggtaaaagcatgtgataggaaggcttttggatacttcttatgacttactctttaggaggcctgggcatgggccaggaccaccgaggtccactgctgacacagggttccagggtggagtcattcaatgagcagggagcagtgggcgagggtgactggggccctttccccactgtgacagcttcagcctcctgccagtttaacctacaccgtgtcttgagtatggaaacagagcagcagctgagagctcccctcgacctctggctccttcgtcctcccaatccttggatgcagtcatggacctatactcacatgaatattgcattctcatttctacattaaccatggccgagaaaagcacagccagaaagcctgctgcaaacagaatcatgatttcttgaaatcttccattgcagggtgattcaatgaaaggctataggattttgaattgggaacccatactagctgtatgaccttaggaatggtacttaaattgctagaactttagttttcccatctgtatcatgggagtaataatacatgccactgagggtatacccctcagtgggaaaattcagtaagtgagcatgtacaaagaatccagagtttagatataaaatctaaaccttgtgaattttataacagaaacatcatgttgtttatcagactgtaaaagttcaaccttaaaagtggaaacatgatcatggtcatttatatgacataaaaggttatttctcataacatttggggagggtaaaaataagaagagaagaggagtttaactcagtgtcaggtagtaaatacccccagtgcctgcagggcaccttgttagggacatccctggagccctttctcctcctctcctttcatccccaactaaacacaaatggtgccattttcacatgcctcatgatttctgaagatttcaacgtgttcctcttgcagttagcaacaagacggatggggaagccagtcccttgaaggaggcagagatcagagaggatgaggaggaggtggagaagaagaagcagaagaaggagaagcgtgagacaggcaaagccatggtgccccacagctcaatgttcatcttcagcaccaccaacccgtaagccaccctcgcgttgctccctctttagtgctagggtaaacggccaggtgtgaggcagggcagggtgaaggggagaggaaggatgggggcccagccatcttcttaagccttcctggtggagcatggccagacattgagcatctggggtgccccctaagtgaggtgggttggtaagttagtcagcctctgaactctgtgcccatagctgaaagagtaacatcgacaggagaacatgagaaatgtcattggaaaggaactctttaccagtctttggtcagtaggtagtgtggagggaggaaggaaatctacttgagattttgccaccaaatattccagaagtggatagagccaagaatgtggagcctagaatgaccagatcacctgttggagttgagaattttggtcacactgctctacatgtggagttttgaaatggtctgctctgagcatgctactcagagcagaggcagggacatgaagtgggggtgacagagcggagtctggaaggttagattcaggaaagatggaatttgggaagagcgttccagcagggctctgggaagggagcaacctgagttaaggcatgtgagccatccatggctagaatgcagaatatagaatacagttactttaaccagaataacctggggctcatgaaaactcattactgctttcgtcaggaattttagaatcaagatctctttttatgttttttggttctttgtaatttccttgggatgtcccagtttcctttcagtgggagagtagacatcgagatacagcagagggtgctatgcagctgccctgagttggtaggctgatgctggctgctccccatggctcagacgtgtctgtggataatgtatcttggcttgcgtgctgcagcctctaaccaatctgattaccttcctccactggggctttaaatcaagggtggtggctgagaaattaaattgctctccctggcggcttcctttggcaagggcctggctgtctggaaggggccaatatgtgtatgtgggagtgaggagtaagggcatgggcgtggtggggagtgggccagctcagccatgcccactgcccgcaggatccggagggcctgccactacatcgtgaacctgcgctactttgagatgtgcatcctcctggtgattgcagccagcagcatcgccctggcggcagaggaccccgtcctgaccaactcggagcgcaacaaagtgggtacacaggggccatgtgccagcctctgtagtgctctggtgctcaccccatcccagcactggaggtgaaccgagatggtagcaaggtttctggggaatgagcaagggttggaaattgtccactcctgttcctcagggcgaagtatgaaccattcccagacaagccccttcttagcccaacatactacaaggctctgccccaaaccggccagggctctgcagggctctgcagccacccatgggcttggatgtgggtctaatatagggtcatggatggtgtgtgtgaagctggcagctgcagctccaccacagggggccaaggcctctcctggggtcccacgggtatgtgtcaggagacatgagggacgcgaggaggacaggagctgacaaggatttcaggtcccgagcctgaactaagggacaggtatgtgggcaattcagacccaaaatgctaagttctggccaacgagagggagcagccaaggagtggccactgggtcacatggctccagcagggcccatgcccctccttctggcatttctctctcagtccagctagtggctctaattccaagcctttgttctgagggtgcagtgggtgagggccagggtgggcgtgcacgagtgcatgtgtcctggcaggtgggagctcatgtagtagcctgttggccacacatggtcatttccttccaccatatgtgtctttcaggtcctgaggtattttgactatgtgttcacgggcgtgttcacctttgagatggttataaaggtaaaaacttctagagaaaacctgggctcttgggtttagatgggtcacctgtctgctccttaggctagagcccttcctcagtgttaccacctaccagccaatggcagccctcagtagagcttctgccgccccttctctggcctcagaatcctgaagaaatctgtctcagcaagacacggctgcgtggatgtgtttgtactgctgcaggcctgtggacatggcccaagtaggaggcaggcaacagatgtgcagacagggttggggcctgcactcccctccccagtgcttgtcttggctgagcctgggtgtgtgccaaggcaaagggctaggtagagatgagtcttcctgggcttcatctagtcccagccaccacaacactccatagtctgtcttgttcccagcctcatccatccaggattttacccatctgtgcatatgtggcaatgcccagtgctctgagccataaatgaaaggaggaatgtgtcagggttctgtgacaaccaaggagtctagtgaaccctgggtgactatgagatgggggcctcaggactcagttatgtggagaaagcctgctggacctaacctctcattctccaggtcctagcatagggttggttgtggagacagtggcagtgggggcactgccatgatgaacagagctcaggtcaagtgttgcccacactttcttggctcactgtggctgttcatatccttctgcagatgatagaccaaggcttgatcctgcaggatgggtcctacttccgagacttgtggaacatcctggactttgtggtggtcgttggcgcattggtggcctttgctctggcgtaagtgactcttttcatatttgattcccttccttcccctcttcctggagactccagttgatttgaagccctttccagaaatgcaacatgcagggtgatgccaaagaatgcccccgctggaaatctgctccccagtcgcccccagcagagctcctgagcgccttgcagctccagctcacgtgacctgagtggcagaacgggggaagcaggagtagggagcgtcaggagggagaagtcagaggccctaggaattcctttcctagagatgagtaagcatgggcaggcactcacagtgtggacagtgtttccatgcattcagcaatggacccaggaacagcttatgggccctttctttcttgagtgtgtcaatcaaggaagcagcttgaaagaaagatgcagagggtagagcaaagttgaggatcacggaatcctaggcatggtgaggttttctattcatagcaggtgtaaacgagagctcttccagggatgccagaaccatgcttttgcacaaacctaataatatgtgtaatctccaaaaggaaaggctttccaaactttccttgataacatacctaggaaaacagtcttaaaccattcaggcaacaaaatcatgttcataatatttgtgggatttttttcccccctgcacatggatccagctctagccagttttcaatcacattctgacatttcctgtggaatctagccaaggaaagggctcttctagccctcctgggattaactaggaaatgggatgctttcagggcctttttcctaacccggtgtatagagtgtcccagtaggatgaatgacagcctcagggctctgtctgtaccttgttcaccctgagcagcttcagcctcttccaggaggcacaacagaattctcagagccatccctcaagtctctctgagtacaagtggaagcctcatctttaggctaagcaaggctagctacactgtgtagtgaggcaggagagctttcaggagcttctgtcattgatggcagctgcaaaaggaacacagtatcttcatacgtttacccttctgagtggttttccctccaagggtttgcccttccaagtgtttagaaagagatcacccttggaagggtttgcccttctaaatgtttagaaacacagggaagctgacagtgcttctccccaagcttctcttcaagcactgtcagctgctgtctcttatcctttctggcagaaaaacaggtgggataaaaattaccagatgtttctcaagtggcctggtgggggtggggatagtggagggctctctctctcttaaggagaggtacaagatacactcccagctgtgctaggagtgtaggatctcccagaccctggaactggactgtgtccactgcttcctcagccatgagagacccttcaaaagaaaaccacattgagcatagtttgtgactctaaaatgggctggtgatcaaggtaattccagtgtcccttgtccccttgtgcacatgttaattccattgtgtgcagtcacctttgtcccccacaaaaagaaagctttctgtcacatgtggctggactgttcttgaggaaattttacagaagcatggggtattttctcaagcatctgggccctgtctggattctcatggtgcaatgaaaggaaaggcagctctggctccaaaagagggacttccagctcctcttccgtcttcttggaaagaaggattaaagtctgcctttgccctaaggagacccaccttttttgttagagataaatattatccttaggtttttaaaaggtcaagttccctttcattttactaattcatttgcatagattattcactgtatcattcttcttattttgatctctaaaaatcatgtgtctctctttgaagtataaaggacaaagagatagaagcatataggaaagaacccaccccatctttaggaagaacagagcccactggcataacaggacagagtggcaagaaaggttgggctgtggaaccagacgggctcttgtttgaatcccagcccctctactttccagctttgtgtccttgagccacacagcaaaatattaaccctcctaacctcagttctcatctctgaaatgcagataaaataatgtgtgtaaagtgcttaggacggggcctgatgtagtgtgaacagtcaatacatgttgattcccctcctcatccttccattctcttatcacatcatgaaatccaaatataggaggaagtacatattgatgcacaatgtatacagatagatgtgtgcaggctggcccaagacctagttgttttatacagacacaccccccttgcctatgcccgtgtgcctggtaaccaggctggtgtgttggtgccagtgtgggaggaggtgtgttttagagggagctcctgcatgcctgcccattgtccacagtccagacatctctcctgagacccagagcagtgatgatgtgcagtagagctgtcatctgtcttgttctttctttgtgccctttgaaacatggcggtggtggctttggcgctggtggcaggggaagccttaacggccccggagctgaagcctctctgttggtcctcagaccaggtacagtgcaggggcccccaggaaccccctcgttctggggtccacacttatgtgatgtattgagagttatgatccatcacttgcttttagtcatgttacttcttgaactctctcttcattttctctgaaacatagatgatacttgctcacccttctccatccattttctcttttgccttcaacttcccaagcttgccatgcccattccctctcccctttctccgctcatggagcaggttcccactccccctcctttggccttcgtcacatttgctgagggaggtccaggtaatgctttctctcactcatgcacccatgctttctaactctgccctgttcctttcctcattaatcgtaccagagaattcagctctcccatcactttgatggggttagccagagtcccacctgccagcagagagagggcctggcctggggcagagagtgaaagaagtcactgagcctatattcctcatggtcaggggctcaggccagcagaaagccaaatgtggggttgtctgcaggcttgtcaagtatctctctccttgtgtttacaactttcgttatcatatcccatatatttgccccataatgtccaccattcaaataaccttattcctgtcccagtctctttctgcccttcttgaaattgaaccatgacttagtgaggaggcttctgtgaagcctattgcttaataaacttgagctatggtggttgccatggtagcatctttctgtggctcctcagaaaccagggctgacatggcattccttccaccacccagccagagccttctcagaccctggcccaactcccaggagcaaagcccctcaccgagtcgggggagtgacctctagctgaattctcaaacaaagctgtggtgtcccctgagccctcctgccgaggcgtgtgcctgccaccatgtatgttttctacaagcatatatgttgtttatgcagtggctgaagagaagactgttctccacagctgcatacatcaagttaagggaacgtttataatgtaaagctggaaaattccattagggaactttattgacttttgaggaggaagggaaggggattttttcatttgtttatttttcttcttggatttattttaagtgtgggcagagcagtggataaaaaaaataaatggaaagatacccacattgcaacttttctgttctttccaattcacttttacgttataaggcatttataagaacactcaggtctccttccttaagcccaccgtccctgcagggaggtgggcagagttttggcaaaggttgggttcagggcttcgttattccgctgccctgacaacacccgctttctgggccacatggagacagagtgtttgctgactataaatgtccagagctgtgccttctgtactttgaggtctcaagaaaagtctggtgagtggctggatctatgaaaccttcctcttttatctttttctttccaatgaagagggattcttttgtgtgatttcatgtgaaaggaccagaaaccgctttgtctagtttccacacaccctgttgccatcgctgctgcttcccagactcctgcatggaaggcaaagatggttacagccttggcatttctggggatctgcacatgaggcacattcccctgctttgggggaccctgctccccaaccaaagtcagctgccttgtagggaggtcacataaccactacacagattacattcatgaacctcacagaaccctcatgtttcatgtgtttcatgtctagtgaagtgacttgggcaaacaggtgggcagggacagcatctctggagaaatgtaggagaggaccaggacacctgtgcgtgtgtgtctttctgtgtgtgacacctgcactccaacccaggactctcaccctctccatttccactgctctacagcacgttacttgactagctcgattcacatgagcaggtgagcgctcctggattggattctaagtagtcatctcacagcttataattgatcgtcagcacagatggtttaatagaaaaataactagcaattctgctcccatctcctcccccacctcggaatttaccatggcccgtgcatcagtcagttacacaggctctctggcggctgacgccaaagcttcccattgccatttgctgttgtagcagggcatggggtgaggtcaggactccctggcactcaggagatttggctcacagccgcacttggcctttcattattcagtccttagccagaaacgaaaaacatgagtcaatctgcctcttgatgccagaaggaactggagttcccacattagcttttattacattcttttcattgaagtatgtcactttcctgacacttgacactctgccctagtcactgagatggataaggtccattgaatgcattcagcagtagctgtagcagcagagttatatacacaggcatggacaattttagatttggaaggatcctaaggagccacataatatgttcctctgggagctgggcgtggtggctcatgcctgtaaccccaacgagtcgggaggctgaggtgggaggattgtttaaggctgggagtttgagaatatggtcctctggttccggatttgcttgtgggattttgtgttttagaaggtgagaatgtgcacatgtaagaaagaggtggctattcagcaccaaaatgctcgtacacactcacgctcagcacagcatagaaacaacagacaaacatttcaccctaaacctggctgtttctttctcctattcttcactacctgcctgtgtctgaggcagtcccctcaaacctccagcgttgcctatgggtcttctttcttgacagaacttccctcttttcaaactgaaaggggagtcttccaaaggaagcagtgactgcacattaatcttggaggcaaaaaaagtggacgaagtcctgcttcatgcaaagaagacccatttaccactgagccagacaggccatccagtgcccctgttctgtggaagagaacgaaggattaaaattaaatttagccgtcaagtagcccattaactgtggatttaggaggccagctgaaaaggaattggaaatttccaactgtaagcagataggaggattttgtttcctgacactccagtttaaaagtcacctcaagaatgactacatctgatttttgtgcccagacaaggacactaaggatgatcaatgcccatggacttttgaggtgcctactactatatcatagctgccttgaaaatggagtttgggagggagtaaggagggacagagtggcagccacatggagggagtgagtgtctgaaaggagataagtcctcagtctacctactcttggcattaagtctcagcatgcatattttttagtgaacgctggaaaatgtgttgtctgctgcatgtgacattggtactgctgaggaactgcctgtagaatattcactttgagacctttatcttatggaggcaatgggtgtgaacacccaagtattttttttttttttaattaacagcatgaaattgggagatggttggttgtaaatgggatctcagcccgtggccacagacccaagcaaaatgaaatgatccaatcagggaacactgccccatccacacggtaaccaacaaccaactagacccagatataaaatgcaccctgtgagccttcacaaccatgggaagagcccagtactgctggattagtggaaactcctcatagtgccctccagatttaaaagtagattttagagtaacttgagtcggaagacttcataatgggacttggggaccatcaacacagatcatgccagccaccttcctaatccacatgcacaggggcacagcctagcatttcaaattagtcttcagtgggacaagtgtattgggtggacttccaccagctccaaggccttcttagaaagatcagcagatgaggtgtctttgggtatgtttagaataagacaaaagagacaactaaatccactgttcaccagattgaataataaaactgctaggagacagttagatgctctgctctctcctgctgcttctcagtgtttggacaaaaacacctgccagttggagtatggtgctgtgtatagcaaaggagaaagcttgcaaaaggctctcgggagtgtgtgtgaggagctcgttgaggtccatgtgcaagagggaaaggattatgcaccacttagcatagagctagtgctctggtcacatgacaaagaaagatggcagaataacaatggattgagggttcgagggtgaccccaagaaatgctgaggcatggaccacgaggaaaaataaaccccaaatggtagccgctaagcagtgacaacgtcaaagtggtaaatttaaaattttcacagaagcagatgaacatatccttatctgcagatcctagagagacaggcactgccagtgcaaaaggggaaacttccccatggggtctttagaatttttaaagtgctttcacactctttattttatttatcaccgaacagtcctgttttacagttgagaagtggattgcctgaggtttgactagtctgactcatttgactagtaaatagcaaagccagttcttgagcaaccttggtgttctgatttgaagttcagtgttgtctccattatgttaagcgcccttctacacatcatgttctagttagctccaagcaattaacccctgtaagctaagagcagtggcttggtatagatctctcctcaacctacagatccttctgtctctacctggtgacagacaagacctatgggtagatggagaaggtcatccctgaacttgtccatcttgttgtttcatctgtaactttttttttcctaggaaccctcatagaccctaaactgattacagggaggggagtgtgatagcttagtatttgagatcaggaagtacttggtcttttactgtttccttctttggttaaaacgctccagtggttcccatttgaaaggcactctaacatcacaaataagagcatagatttcagagtcaggcacatttaggcctgaatcccagcactattattaaccgccttaactttgaacctctgcttcttcatctgtaaatggggattcaaaataatattttggtcctataagcattaaataaggtaaaatgtatttaatgtctgctatagtgccaaggacttagtaattgtataataaatgatagttattatttcctaccaaataatagtccagacacattagtgagacactcgaggctcctcacagcatgacccctccatctacctttcactcctgcgagcctggccattccctgaggcaagagattccttcagatccctgagctattccccgctcatggggtagggcagaaggccatggcacttaaaggacagaagggttctttagaacctgatgtccctgctctgccctcatgggaggagaatcagttcctggcagaaatcaacttgagagcatgtcctttgagaagagggggctgggaggtgaagagcgggattacattgaatgatgagtaattacacatgaaagatctggagggcagcttgacaattgagctggaaaattctcgtcttttactgatgaaacaagaaaaatctgtcatttttttttttttttttttactggagagcagccaggaacttaccaaataaatagaaaataaatggtaaaatgtgtggcccaattgagtcccaattaaagtgagaccagtgcatcctagtgtgtggaattgtccttagattttaacattagagtcaatttttgaacctgatagaaattttattaatgaggcagtgtaaaaatatctgattataatttagtatcagagactagcaaagtgttatcaaacagttacatttaaatgatttgtaaaatgcacgtgaattatttcctaaacaatgtgcctcaattaaggtacttgaagagctcatccttttagtttggtgaaatgtcttccttgcaatcttgttggctttgataatggcttaaatcactcttgtatgtatggatttgggagcagtactttggcctagtccatgtgtaaattatattttaactaatggggactaaagtgttgaggcgtttcttgactccagggctttgttattcagtactcttttcatttcaaatggcaattttaaaatcagttaaatcttgcccctgttaacaaaactgaggatgaaagcatatttttctgcagctattccaattcatagcttttcaatggctcctctgcagtaagagacctgatgaaagatgcgtagagcaatgactaattttatttttttttattttacttttggcctgtgtctgattgctatccttggctcagacctgtgggagttaggatgtgacaaatagcccccccagtggtttggcagccacgttcagctgttaagattagagtgtaccattaaggaaccctgttttccaaaacaagagacaatggtgagtttgcattataacatgccttatatggtatatgtggtaatacaatgaattataccatgatgctttactaggattctggggggaaattaattcaagagagcaaattatatcctttatccaggtgtgtgggaggagcaggaaatattgggccctcccgcagaagacgcatgtctatgagcatgacctctgagaaccttttcagatgctacaggatagaaaggtctccgagataaggacttgagctaagcagaaggcagaagcttggggtgtgtgatcctagatcacctgcccatatattgatctcccaccctattcttacatcttagagatatgaaagattatcccttagttcttccttaagacaaatgtagcctggggaaagggaaacctttgtggttattttggtaaattttttaattgatttcatttttcctatggcagcttgcagttatacttttattaatgtgcttgtttacttgaggtctatcttccctactagactaggtaagtttcaaaaggttggcaacctcatttgttcacaactgtatatccagtatgcagaacagtgcctgacatatattaaggactccacagatgcttggtatatggatgaataaagatgtgtttggctgacctaccatatgccctgtcttatatgtgagaagatgctggggaagatatttctgtcctctgaacatttagaggttatcacattaaggatttaaggtttataaggccttgggtctaattcccaagtcatgattcatttggcatttatagtgaaaattaatttaattttgaatatgggatcatttgttgagtaaaataaccattagaagtctttgcttgtgacatacagtagtggaacataggtttgccatacgttggcaaaaaataagaaaggaaagaaaaaaagtaaccttcatcacaatgtccaactaagaaccaaagcctgaattatgagcacttcttcttagcagcaggccaggatagggaatcatgagatgcaggttcacctatgtttctaaactcactcagtgaatgatcttaggcaaggcacttcctcctggggcctcagtttcctgtgcagttgggtggatttcagggatctcttccagctcagaaattcactgtgctgtttgacagaaccttgaactaaaacctgctgatgcagagccttagtggttaagagcaagagctttgatcatcatacatgcttgggttcatgtcccagctctgccagctgatgtcgggcactcaacctctctgaatctcttctgtgaaatggggatagtgattcctatgtgctaaagttaggaggtttaaataaagatttgcactaaaattgcttagcacagagtctggcccagaataaataaatattcaaaaaatttagaagttgtcattatttctatcttgaagatatttatgccctgacttattttaaatgcctcaccagtagaactgggatgatttttcaccttcaagctgcacagtatgctcacaatggactggcggtcatttaatttatcaaaaggcaaactttggtgtgacatcatgatcttgacagacaaatgcctccctcccttatttcaagttggtttaatggtgttgctcctctgagcttctaagagacatcagtgagtctctctctgagtggttgcgtgtccctctttagatgaaaccctttataagcataactgtgccagtgtgtgagagaatttctggcccagagtgggcatagttcctgcagcctggtttcttataaattcactggaaacagagtttgtctgaagactgcataggaaatgaaagtaaacgcctgcacttagaaaactgcagttaaaccagactccatggaaataacacacaatacccagaagtctatgtagaattgtcccttgtgctggcagagggccttcgcccctgcaggctgggacagtggcaatggagcaaatggtgtgctggcccttcctttcacaaaggtgtggacactctaagtgccaaggctgtgggtggggtcccctgggcctgtgctgctctgattccctatcattgtagggttctcttttctccctgaagtgttctgactgtctttcttctctctaccccaaccccatttttttgttttgttttattttgattttctactgctctctgattggatcctccataggaacgctttggggtaaatatgttcgattatctttgaagtaaacgatacaaggaatgagttggaggagcgagaaagtatggttgggaggggaggggctcacgcactgagaaaagagtggtcagtttttatttatatccaagggatcaaaattaggagtcaccaagccttcttgggaaatggtcattcttattggtttggatatgtattcggctcatatgttgcctcttttaggtatgtagacagatgagcctaatgcagtgaaatcgtttgtaaaacatgccaaagtctctggatgctaaagaccacatcagtgcaaggcttttggattatttatattcagatctgggattgaataaaagtgacttgtaggtcatggcctataatcattaagagagtcttaaaataaacattctgggcaaagtcagcattccttcaattcgattaaatatcttttggcctcgttttctgtgaaagaatggatggacttttatctccctgtcaggggggtggggtaggggggtaggtatcgcaggaaggtcagggggaaagcagccggaagccttgcagttcccacctgatgttctggaccccatttcctcagattgttggtgtaagagtaatctgggtcaacatgaagaaagagacagagcctgactccactatttagagtcttgttttccaccatttgtgtgttttataaatgacaactatttgaattgaatgcaaatatctcaggggatgaacagagaagaaagagaaatgcaaatgtatttgttcattttattcctaaaaataaaaagagaaacatactgtcactattaggagtaaacatttccaagaggctgactagggaggatcaatagctgtagggccaggataaaggtaggctgggcctgcagtttgggcctcctccagttgagtggctctctgcagcctgtgctaggtgcacaccatctgcaatggaagggactgcgggaacagccagccacacagaggtactggggtgtgagccaaggtcctagctagaagcctgcatgacatgctttctctggaacacgtggcccagtgagagtgtcatgtctgccaccctgcctcaccttgctgtctcctgaactaatgaactgtgcagcggtgacaaacccagattaagtctagtgccctgatgagacttgctctcaactgtgggttcatcaattcagcgaatatcatttgagaacctatcatttgacaagcactggattaggcacagtagggatctgaagtgggctactgctcacgttccctagttgatgtgtcttccgttttcattgtgccagtgtggtaatcagcagcattagactggtagttagggaaggaagtgtttattaacatatgtgcatggatgcctctgtgtgcctgtatgttcctctgtgtgtgtatatatgagtgtgtacgtgcatgtggatgtgtgttcatgcgtgcacactgggaagtgatttgagaatattcctgaagcatttttcgcaggatgtccctggagtcaaatctgactcagtttctggcttcttgcctccatctctcccatacatctctccccttttagcctgttgttactaatgccatagtttgaatgtcatttttatttctcccccattccatatgattccctgggggcctctcccctgcagaaccaacaaaggacgggacatcaagaccatcaagtctctgcgggtgctccgagttctaaggccactgaaaaccatcaagcgcttgcccaagctcaaggtagtgtttacagagtttgttcccatcaaatccccttctcccatcttctctctttagccatggctggcctgcctttggagaatttgttctgggaatattcctttttctcacacggatatcgaagttcttttcatctgcctgagctaaaggtcttagtttcaaaggaaaataaccaacatcccaagaaatctataagaaagctttttcttttaagttcagacccagatggtgtcttctctccggtgtgatatgtcatccaagagggaatcctgtgtggctttgtcctggggcctcctatgtctatgtccccagtgcagacccagaacaccagaatggaagcaacgggatccctctgtgtgttctggtctgcatattttttaaggccgagtatcctgggacattttctttttcttataactcaagaggagaagaggctcttctagccctacccttcataattttgaggcacagataggtcagtaacttgtccaaggacatgcagtccatttttggcagaggcagagaagaaatgggaagtgagctgacatgaattaagttcttcctattgccaggacctttactaggtatcttacccagatttctccttgtctaatatgctccctcctcaactcccctggggttccaccttccacgagtctccctgcctctcaggaaagcttcctgcactctatcacacaattctgctagactgttgaacccacctgccccaccccgcatactttgctgttagtggaagctgaggctccatgggaggaaagttctttctctctgaattcctgtgaatgacagcaaggcactgccagggagaggaccagagctcctggtttccagccccaaagtctttctgctgctcaggccacatagccagtcaagccccatcttcaggggctacaccagaatacttcccagcaagcagactcaattccctaacttcagcatcacatggaatcatgcagtgcttctcaaggtgtgggtcataggccacctgcatcaggatcacctgggtacttcttaaaatccagattgctgacaaccgcaacacaacagagccagactccctgtgggaggggcttggagtgcgcctcctaaacgggcttcccaggtgactcttagaatatagtgtagtttgagaacccctgtcaatattaaaaagaacccacttgagtgcgaggctcagctctaggacttagaagctatatgacccagggcaaattacttattctttgactttctttcacatgggaaatgaggacacattgtaactcatacatctgtggtgtggagaaaatgaactgacgtgagtggtccctgttagaaaactcaacagttcctctggaatgcctgggcctgctctcccaagcctgccacggaggacacagcttggggagggctcttgtgcacttggctctcccttgcttctcaattcccacttcctattgaattctcatcacctctgatactctttgcccacgcctaccccagacctccttcaggcctcatagcactgcttccctttcagccatttagctctgcagagaggaggcaaaactaactaggtttgtgaaacagaagaaaagtcacttctgagaggccccgatgtgactgaaacctggctacctttcagagcccagggccctggcccaccgcgtgggttcccagagagagacacccatgctcccaaggaagtggcctggccgactgctgtcctccctggctaccccgccttcccccctggaggaagcacttctcacaatgtcagctgtttcttaccaccttcctgcccataaatgctcattgggttctgcctcacacacagagcgtggccaggctgccttgggccctgacccttatcagtattgtcagtgatcctgcagggcaggattcagtgggcctcaaggagagtgcagacaagcttgatgagattcgttaataggccagagaaagcaccctgcaacctggcttaattctgttaaattagaaagggctagttcctcgctctgcagctccataacctgagagagacgtaggtggctctgatgattccacaagggtgcctgtcacttacattccctgcagtgttgaactaattaaaccagcagtgcttcacccagtgctgcaaagaagcaactgcacaaatgcagcaccaccgtggggctagattgtcctgtgagctaaacctaaaaacctagaaaataacctgaaaatgccctgcaatgtattgaattcccatgtaactcctcacagcttagggcctagagtggaggtctctggaggtctgttgccttttaactgaagtgtaagtccctagttctatctacccagcctcgccatctctaagagaaggtgtctattggtctttcccacattacttctattggtcttcatcccaaatgcagccaccttcactagagaacatttacatgaagtgctgaatataatcataaatgtatgaacttgcctatgaaatattagtgaaatgaacaaagatgatagtgtattattacctgatccttttagaaaggtaaggagaaaacaatacataatcagtatataaatcgaatctaagaacgtcaccaaataaagcacaagctatttaaagactaaaattggctaaatgatctcaaatattccttccagctatacacttctatgcttcacactaagtggagtacccgtaccaggatcacacagaggaccgcattccttgcttgatatcatctgatttctactgcgttgggtctacattcagtttcagaacatgtgttcccatcccaggtggtaggtccttgcagtcataaccagcttagaagccagcccttaatctcatgagcaccacctcacctcttagcaggaaattctctcctgggacaacttcttggtggggctgggtagtggtggtatggcccagctcggctctaggcaagtatgcagaccatcacagggttcacacagcagggctgtttgctctgtccacaggccgtcttcgactgcgtagtgacctccttgaagaatgtcttcaacatactcattgtgtacaagctcttcatgttcatctttgctgtcatcgcagttcagctcttcaagggaaagttcttttattgcacggacagttccaaggacacagagaaggagtgcatgtaagtgccaccagcgcattccacttgattttgctgaagcatgtcctgatgatcccactccaccaccacaggtccaccctccctcctttctatcttacccatctctgctcttctttcagcaaaaagacaaaatggaatcaataaactttttactgagtgcctcttttgtgtcagacacgaaaacttgagtgtaaaatatctcgtaccatgacattttacactcgagttttcatttcaaacccctataaccagctattgaaataagttttatttgcttattatacaagtggaagctaagactcagaaagtttaagcaagttgctcaaggttacacagccagtagtgaaagggttaggatttactcctgtatctgttgggcaccaaatcccatttttgctccatggtaaaaataccttcctttaatagaattccttttgccttacacatgtatggtgatcattattacccccacattattgcggcctgtagaatgtgctgactcttctgtagaatgagctatagtgaggaggctctctttcatttctgctctggttttagaggcaactatgtagatcatgagaaaaacaagatggaggtgaagggccgggaatggaagcgccatgaattccactacgacaacattatctgggccctgctgaccctcttcaccgtctccacaggggaaggatggcctcagtgagtgattgagttgtcatgcttgtctgtggctgtgataggacccctggttgccttgagaagctgactcaagatgaacaaggctcacgctttgttattgtatcagggaaagtaaggggttttgagaaggtgacacaggcagaaaagaggaagaatgaaaattcttcaggcaaaaatagagaagtgggtgagcaaatcaggaaaatatttgaaactcttaatgttttagccaattattgaggagtcaagtggagccatctgacttctatggaacaaatgagttttgaacagccctgtacccataaggagaattcctgagagctgttatagacagatttatcctccaggggggcccagcacctgaaagcctgaggattgagggttaagaatgagttggcaaaacccaaaggcacctcctgtgatcatgaggaagaccacagaatgcaggtcttatgctgcccgtagttgaaagctaatttctcagagacttagcaatgactaagacaccactctctagtggcaacaggttctacttggcagcaaaatgttaaatgggaatctgggagtctctttgtattgaacatgacaacctaaactatgaaatggtgtccctctgttgcttaggagttgagtgcgtgatggaacagaggctagaaagagaagtggattgttgatagcaggatatgacaacttgggtttggactcaaaaaaaattaatggaggatctgcaaagtcaaagaagtcagataaaaaattataataggtggcacatttcctaacgaagccaagactgtcatccaccatctgtgccctcttgttctgtccccatagagttctgcagcactctgtagatgtgacagaggaagaccgaggcccaagccgcagcaaccgcatggagatgtctatcttttatgtagtctactttgtggtcttccccttcttctttgtcaatatctttgtggctctcatcatcatcaccttccaggagcaaggggataagatgatggaggagtgcagcctggagaagaatgaggtaatgacaattggtctaaagtggggagcagcagaggctccagaaaggattcttgggccagcaatgtaagaaaggaggactgcattttcttaacttgattaagaattatagagagaagatgggaaaagtaactattcagccattaaataaacattttccaagcactgtttaaggcccacgtatgaggcacggagatctggaagatatgtaagatgtttaacatgcagtctttacctttgtgtgcacatagtctagaaaacaatgataacttcagatatctgcttatctgactgtgaccttccatgccatgtacttgctgtaagggcagggaatgtgtcttatcgcagcttttccagcaacaagcatagttctggcacattgtaaggtttcaaaagctgtttttgaaatttctttattttattttattttttcgatggaactgaactagaaactgttagggactgtaagagaaatgcgacataaagtgctgtagaaatacataggtaggtagatctttacttctgactaaggacatcaaggaaggattcctgcctaaacagctcagccacatgctgtgtaaaggacttttttaataaccatgaagtccctactccatgtggcaacacctccagttttgtgtactcctttaaggtgacgccttgtctgtagttttgtccaagtgaccccagttgccatctttacttgcccagccctgccctttttcccattcaccgtcctcctcttctgagcatggaacagagcctgccatggtagatctaggggatttgaatttgtgctaataaccatgactttcttgcagagggcgtgcatcgacttcgccatcagcgccaaacctctcacccgctacatgccgcagaacagacacaccttccagtaccgcgtgtggcactttgtggtgtctccgtcctttgagtacaccattatggccatgatcgccttgaatactgttgtgctgatgatgaaggtgagaggagagaggcacaagagccgactgagccccagcgatggttccctcccagggcaagtgggaagacaccccaacatcccagcccatcactgctttacctacttttccatcattgaatccttttgtgatcttattttgttcaataacccaacctctggggctttgggggtccactgagcaaaatgcagtgcagactatagtagccatccaggggctcccaagacctgagatggcaatgggaggcagcttcagacaagggtggaaaaatcaggagacagagatccatcatcacggggtctaaaggagccttggagtattcagagaggctcatcctatttaatactaaatgactaactccagtaactaactctagaaaatgtttcttccctgcccaccctcatctctaggaagactggctgttttgctattaagtctggtggggcgtgggtctgtgttttcctttgttttgttgggtagaatatgtggttctcctctccagcactcgaagtccatctctcctcctgtaccacacaccagagtgtcccacagggcaggaatgagagatggccaacctcagtgacatgtattccccctcttaccttaaggctgtgattctttctctcttcttttttcttcctggcagtattattctgctccctgtacctatgagctggccctgaagtacctgaatatcgccttcaccatggtgttttccctggaatgtgtcctgaaggtcatcgcttttggctttttggtatgttgctgaatccttcccagcactgggcttgtctctttctgttgggtgccttcccagtctttgttgaaggggaggtggttactgctattccagaaatcacccacctagatgtgggctcgttttgactgctcagtaaactgccgtagagacaagatgatgtgtgaggaagctgggagaaagggcaaaggaagccacagccatcagcctggtcctgtgaaattctgtcagcagtccagaggcggccatcattgagtttcactagaactgcaatttatgtgtagatgaaggaggaagccaaagattggactaataaacttcgagtgcttatttactggtaaaaggtataacagttttataacacaaatgggaaaataactatctctcttagcctcaaacatagcaaataatagatttttacctattagtccttctgccattagtaacatgaagagtaatttctgccaaagaaaataggtgtttattacttatgcctataaaggctaatgacctttaaggggtgtgtctgtgtgtgtgtgtgtgtgtgtgtgtgtgtgtatggagtgcaaggggaaggattctggaattaagtttgaggaggtttggggatgatgaatttttctgccatgagccctcttttttcttctcctcaactactattaataattataattgttgggcaaattcttgcatctgtcctcaagagtgttaagaaaatccagcccttggcttcagtgccctataaacaagataatccccttggccaccctccccccaacctgcttcattgtgtgcagcaagttcagtgggatgcaagcccatgtgacagctgtttcacacttacttaggacgtgagctaccatttcaaattacatgtgtgtatggctttccctgcaaggaggagaactttgctcattatctgaataagtgtttgtctggtagcagctttaacagagactctgggctgggttcgataattgtgagtgttgattacgggggctgcttttggtctcccagcggttctttgaaaaaccattaatttgatcattttgggtggagagtttaagggaaccaattgcagttggctgcattgtgtttgcctggctcccttttgagtgttttgagacttggggaaataaaaaagtaaaagaaactactaccaacaaagatgcctttataatacagtctagccctgagcagggggagctgagagagagggagacgcaagcaccacaacagggaaattttttctatgcatgttgattacttgtatgtggtattgacattgtctgtgacttaagtcccattatgtgtctaattatggtgagtgctgaatatatactcacagccttaactagattcggcccttgaagcctgcctccttcccaccctacccccatgttttcattcaaggtctagagggattttcactctgtaaaaggtaccactaattctgataagtctttacattgttaaggcactctaagctttcagaatattgtaatatatactatttcgttagatcttctcagtgactctgaaataggcatggcagatgtcactatcataattgccattattgttgttgttattttaaatgaggaaattgaagttcagaaaaattgtatagcttcttaaagattacacaatgaaaggcaatagaattgcaaggctaaatgggaataaaaagggaagggaaaaagaaaaagagggaaagatgtaacaacaattggttggctattaagtaccaaatgctttacatattgcttttctctccataacaatatattaaataagcattcttattttctcctttttatggatgagctggagctcagaaaggttgaatactttggccaagattagtaagaggtagggccaggattcagaccctgttctatctgacttcaaagctcacaataatctagtctacactgcactgtactattctataccatataccagtgttctagtctataccacagcatgctattctgtattgtaaagcattgttaactggaatccagagcttctggtcctctgagacctagatccatgcaccaaggtttagaaagaattaaaaccaagaattaggaagttcaccccaggttggacaataggagagccctgagaattgaggaattcggagacttaatttagctccaccactgatagactaaatattctaatggaaagtgaatttatgaaactgtgtgattcagtctgtccatatgccccataggtacatgtggctttgtaataaggcctctttcagcctcattttctcatacataaaatgaggataatagtagctaccttatggccttagctactttgttgtatgtatccaattaagtgatgttcataaccttctgagtgggtgttcattaaatgtaacttctctctctccacattccttttctttctttattgggtattttcccccaactcctcttgccaactcttccattcaggactttatgaacatgggatatttttcaatccctgcctctaggatccatgagaagaataaatgagttgaaagaatgccaaaggcctggcctagtgtctggctcatgtaggaattcaatgatgctagttgtgaggctgggttggagtatacttctgcagtgctctgagagtctcttgtgttttattccaaggatagaataaaataatccattgtcctgtgatgttgctgaggatatcaattacaggtgtttgaaattttctcctcctggtactttctctgtctcctctgaatttctttattctgttgatttaaatctctgttttctgtgttacagactgccctttaaatgtcccaggggcaggcaagtgaattgtttttgagattcaagtgtcctttttgtttgtttttaaaggaacatagtctaaggtctgtgttcatctgagcctaggagatggatgcatagtccaccctctcctgttaaatggagtgttatctggttggtggattttccaggctctttatatctccttcagcccactcattgtattactgcttccttgtacttagttacatctcctcaaaagatgtaacagcagagaaagagtggaaagatgaagtctatttatcctattaccaatcagtagttggtttgaaaaggctcaatggagttaggaggagatttttggcacatctgtaaccttcagtcacttatgacttgtgtgacttttgttgatagttgaaagtcagactgtattttatagggcacttgacgcaatagagataatttaaaagttatagctgtatgaccatggcaatggtttcacaggtacaaacgtttccccaaacccatcaagatatagccattaaatatggatagctttttatttgtcaatcatgcctccatagaggtttttaaatacataaatatttgttaaaaataaaaattgaaaaaaactttttttacatatgagcttttggtgacagttttcaaagataaagtcttcaaatagtgatagaactgctttccaaatgagaaatttccagattagtaaaggagaaatggcatctctggttagaaatgggaaactgaagccaaagtaagagtgaacttatgcattaattgacaagttttatttccaagggacaaacaaagttatataatgaaagatgtcttttctccttttttttttctttccttttctgatgttcctatgactgaattcatttggcagaactatttccgagacacctggaatatctttgacttcatcaccgtgattggcagtatcacagaaattatcctgacagacagcaaggtgaatggcttataagatccatgtctgtaagcttggccctggagtagcatttttaaaactcctctgtatattcagtccatttttaacccaccaaagcaaatgcgtacccctctaagtgttgggaatttactcccttgctgcttggcatcagccagggaatgcaaacttgggagtggcactggatctccaggaaggctttgttgatttgcctgactcaggcagcagacctctaatggggtaggtgggatagacggtgtcagaagagagctagtatgcatagcgttgcactagagtctcaaaggaggcacagtatctttgccctcaaagttcacagacctgtattttttccataaacttgttccttctaaagatgacttggagagctcagggtaactctctttgaatattagagggccagcgtgtgctagaggggttcctagatctgctctttttggcatttaagtgcagacttcaggccactcagtagaagactagggaggctggttttgtgtgcagggtacccttctccagtacatcctttacccttctacctggggatagagagcaggcatgggaaggcttaggagatgggcctcactggccagcccatcagctggaattggggttaacaaagacagagactgtgtcccatttatcggaatgagggataaatacacaaatactagtgcttagatttttctaaatcaccataatgttcctaattatatgtttccttttggtccaccagctggtgaacaccagtggcttcaatatgagctttctgaagctcttccgagctgcccgcctcataaagctcctgcgtcagggctataccatacgcattttgctgtggacctttgtgcagtcctttaaggtaagaggtaccagcaaatcctctctgagggttgtcatatcagacagtacagccaggcaacactggcatcattacccaagtcccttcacctctgggaagctgaagctagtagaacgggtgtttgttagaagcattcagtaaatactgcaattcttagttacagcacagcttggcttgactgggatcagcttatgtctactggatagaatcttattttagaaaaacaccttgactttgtgactcaggcatcctctctgtctgctgaggcaggggacacattttataagatgtgcttcatccatagagattccagacagtcctgagtaaccccatccatgtaaagagccagccatctgtagtcagatgtcctctgcattttcagggactttgggtgtttgtttttatttcacatgaaagtttttcaaaggactcattgagttgtgtttcatagagagatgattcatacttagccccacctttgtcttcatcagtgtttatttcctgagccactgaacacagggtatactaatggccacctctgtgtcctacaaataaatagggacatctgggcaggttaatatgatgtgtttcctctgcacagtctcgtggagctgtacagaggtgtacatatgataaatataagtaaaaaattgacagctgagacccagactttgagtaaaagtttcttaaacatactgaaatatctttggactctagcaaatatcataaattagttgtttttaagctttggggggcctaaatgttgttcaaatgcctgttcttaccaaaatgagtttttcagtgaatgtgtttaaaaataaatttgatggaattaagtgattcaaagatgagaaattatgaattcaccaaattgactttcttattttaattatttatagtttaattaaaaattaagctaaagaaggcaagccagtgaattcatggtttctcatcacttggaaaaggatttctccccacatccatcattactgatttacttcttcatcgaggacctgggattttgagatgtgagatcaattttaaggatgttctggctcctaggagcgaccttgacactttttatcatatccagagaaagtgtttggcgtaatgactcccacgaggcctcacttcaatgaaaactatttttctaaagttagatatggaggataaatctaaaaccttagtgagaattttctgagtctcaggtgattttggatttagaattggaaacacaacatgcttttaaaaccttttttttttagaggattgcccaacaaacttcagtggttagtcttttaagaaatatgtgtcatcctgtcatattatcacaatcaccaagtctctgagaaaccatacactattgagggcaaagaaaatattgtcaaaaattgatggccaaatggttggcttattccagcaaatactacagagaacagggaagacaggtgaatttgcctccaggtgacactgtgttatagatagatgttcccttttcagaacagttctgtgacacagtatagaagtttgatttttaaaagtcagattaacaaagactacctctgcaaatagaaagcagagagccacacgatataaagagcatcgccattgcctatacctcccccaccctccctaaacagcatccagttttctacctctgacccctactctagagttcttccctcttttcccttattttgtgttagaatgtataaacatgacaagaaaggaaaacagaatgaatctttgcttttctccctacattgggagtagggagagataaactagggactagagtggagacagtagaataagggcagaaggtaaagatgaaaggtagcagcactgcaggcacaagaaaccctgtccttccttctggctttctgtagaggaggtccacattgcccatcaaagtgtagtcaacccccatcacagagcctaggaatcaacacttcattggagagggaattctcccacccactttcagttgcattttaattttagcctctcttcaagttgtaaatagtctcatagggctcttcattttgttagtgctgttgaaaagctctgccctgctcatgcagtctgaaagcctcaattgatctcctgggattcatgatgtgcacaatcaagacagggtggagactcctcgtagcactgtctgccagggagcttagtggatggtaaagaagagggacttctctggcagcgctgagatcaacgcaaaattacagtgtcccactctggccccaaatccaaactgtcctatgtctgcatcctcctccagtaccaaggccagttccctgcctcatatctccttgccttgaccctcacctctaaaactgaaatgttatcccaaagtggcaataagcatgcgcagtatggaattttgtgccacatggcttcatggcagagttttttggtggctaacttaccaggcttttgcatgaaacataataaaacgccaggaggcttaaatactgggaaatgacatttcatcagaaaatgaatgacctttctaggaacttacaaacaagtgagaccccaatcatttcactttgattccagattcttcattatgggtgccactttgggtatgggagtgggagggggtaatacagggatttggaagccaaagctaggtgcttcatatttaatttgcatcacaattgctaggttattaattttctgcatggcaagtgggatgaaccccaagcccaggaagttttcccagctttccttctagatatgggctacatttatgggtgagtgaatctccctgatagaggtaaattttaagcctccctttggccaactgtttacctatctgtcagaggacaaggatgcctgagaaagtactacacctcaaaacagaacaaccccagggaatagggagtcccagtctgtgtttgcattagcctccaggcaagatcctgtactgccggtgactgcaggttgttgagcttgggtgctgcttttctttgattaacgtcttatctctgctttccttccaggccctcccttatgtctgccttttaattgccatgcttttcttcatttatgccatcattgggatgcaggtgagctggtaaatcaagggcccggtgggggacagctgttacccagataatctctggcttagcaacctaagcatgcaagacctgaagatgctttgaaccccttcttgcctaagggtgctcccctgaggtcttgtcacagtgtgaccttgggaatttcacatgtgcagtggctccccattttagcttgcctaagtattcagggtagtctggtacaggggcttcatctcaggttgtcagatcatggtgctaattcataagcagctgggcttctgtggtgacagccatagaactaaagcaaagatgacaccattgttcttagccagaaagatcccccaggagactaaggatctatttctcaggatctctggtattttgacttggcctaaaagaaggtcagatgttagttcttcctgtatatggtgacaccaaatcaccacatatagtcatggctgtcttatagagtcttatacttacacagtcttgactggctgagatttatgccctaagatacatcactgtgaacaactcatggagttcctggcagcccgttcattcctagggagactcaagggccacattccagctaattaggccatgcaacttcctggacagttcccttgttttcccatcccaggtatttatgcaggtagccagaggcctactaagcagaagaagccaaaggatctttcaaagatgatggtggttcttggtgggtgaattcctactgtaaataaccagcagcacatcccatgaacctatctggttggagacacaggctttctgcttgtctccagagggctaactttctgacttggagatattgtgactagatcccagcatagaacttcggctatgtgacagcctcctgcagtcaggcagtctggctgccttgggcctgctggctgccttcccaactgtgttgccacctggagctgctgctggagtgtcccagccttgctgtgtctgcagccttttccagaccctttctgaaatgtctcttcctttcactcttctctcttgcctgtacttcttggtttcattctttaactctattactggagaattttgttctctaaaaatacaatagaatgtcaagtgtcaaaatgtgtgagacttggttgagaagtagtgggttctccttcactgaggatatttcagtaggaatttaatgatcatgttggcagtgttggaaatagaattcctgctgaagtttcatattggctttgtaacgttcatgaagtcctgtctaactccaatatatttgattctggaattaaaatattcttgaagagccaaatgaaagcttgatttaaattattttttcaaaattgattttttattgatgtataattgtagatatttttggggtacatgtgataatttgatgctcgtatacaatgtgtaatgatcaaatcagggtaattggtttatccatcacctcaaacatttatatcttatttatgttggaaacattataattcttctcatctggttatcatgaagttccttttgcctatgctcaaaatagttcttaccccttttcatcttcaaataaaataaactagaataacaccatctccagtactgatctggtatgaatattgttgattctgataatggtgataatgctgtttatcattatttaaattccttggtgtacaagacgctgtactaaatgtatgcatagagagagagtgaggggggagaaagggagggagtgaaaggaagagagagtgagcatgtccaggcaagacatatgactaatgtttctgagtaatgtgaaaacgtttataggtgagtttcattgtctccattgatgcttagcatagttaagtaacttataacatgctcaagttctcagacagtaagtgaaagaggtgagttgtaagatcagctctgtctgctccctagcccatgttcataactctatactgtgtctcatcccaccagacaagcagacacaagtatttatttttaccctctagttggaggtagaagttgttcaattatgaaattgtagtcttcacaataactgtatggtctaacatcttattcccctcagatttctttccaaaggataatagcaccatgtccattccacagagacatgaatgacatttctgctatgacttgctttgagctggccatccccatcctggtctatgacagagacacagcaccaagcacaaagcagacacctgagcttgttgctagagagactgtttctaatatagtcacaacaaaactgagggatctgtacaaataataaacgcaagggcagagacaagcttttggaaaaatattaatagcaacaaggtatgtctatgagaaaaaccattattattccaaactttcaaaggcgccttggaaaaagggacctttgcagaagaatcggaagttcgaaaggaggagtaacttgctggggatgagaaagagccctgtggctacgtggtgtcaggaagtgggattgtcagcctcagctccttcactgaacaactgtgtgaacttggtgaagtcactgtatctctcttcaccttaactccctcaccagtacagtggaggtgttggttagagaccttcacaagtctcttctagttctaaagttctgtaatcccaactgaaatggatttaaatctatactctcatgagatttttctatgaggcctcagcatcccttctttctcttccataccctgttgatggaggtttaagttagtgacaaggactaagtgaaaagttgaaaaaaaaaaaaagtacaaaaaatttaagaacatcttcacaataaatatgtgtttttgacttaaattatgtttgttttgttctgctttttggttttttttttttgtaaagatgaggtctcactgtgttgcccaggcttgtcttgaactcctgggctcaagcagtcctctcacctcagccccacaaagtgctgggattacaggtgtgagccaccatgcccggcttgacttgacttaaattatcttagattcaaaataaatagttttggtttcttggactattacacacatactttgtgcaaaatcgcagtgtgctctgcagttagtttgtgattggatgaggtgtttgagaaaatcataatgaattcaactcatgatacctccagaagtgtcatagggaaaaaagacactgtaagttgtatgtctgtggtgaatcagggataaatcatgaattccaaaccaagagggaagaagagggcaggaaatgtgaacagggcaaggataaatgtcagtgccctcctggggtatccagagttaattagatttgactgcttgggtgggattttttaaatgctactatttgtctctttggggccctctagcttcttcttctctttccattcttctctgctgctgcctcacttgccacctccattctccctgagagacaagtagtatttgggttttgaaaaacagcattgagaacaaattcccagagcaggtgtcagtgggagttacttgagcaaaatagctgggggcagagattgttcctcaattgcacattctaaaaactgtgagggggaaaatgtgttccatttagcatacattggataaactgaagcatgttcaatgcaggctgaaaattgtctcaaatgactggaaaagtaacccagtaagtccgcgattgtctcaacattgacttgtgagaataggtcctgatacccaaaatgtggttggggaaggagggtgcatgtgaaagcctccttttcatctgaagagtggaggggttgaccttggctccaggcagtgctgtgtctgggagttcatcattactcagtctctgtggataaagatctctgagtgttccctcttttgaatgttcacagtgattacattctaagctcagtagccagcagcagatcagcaaatctcattctgtcacccagaatctgcccaaagccattttctgttttccttttcaaagtgcccagttggcccgactttctccatcctattggcctggacttcattttagctcctgcataaatgtttccttttggatgggatttgggtctgttggatgatacatgtggacatatataaatatatgcatgtggatatatgtgtgttcaatctcatagattctacattaatgacatacagaccttctaagatgtgactcaatggatagaaacatatctaaggaagatagagatgccactctctaacctgatctgcttgtaaattgcagggtggcatctgcccaagccataaatgatgtcttcttgcaaatctgaatgctcccatcatgactacctgagacaggaagagaggggtagctccttctgtgcactcctgctgtgagataatgtctttgacagacgcttgagtaccatggtgacaggtaccatggaactaaaagaccagattaggtgtaggaggaactatgtacaggcagaatgacttcaaaagagcttgcgttctacgttatgctcggaccttgctgcatgggtcccctttgctgcactagagcagtggaggataattattcttgcatatcagcccaaaagcacagtatccagcagctctctgggtctgagttgtctgcttcaggggtaggtcatcgggaagagccatgcaagtggctttgccaaccctcatgtgctggacacatcacacagcttggtaatgctcactgttttctgttgtttctctcctcaaggtatttggaaacataaaattagacgaggagagtcacatcaaccggcacaacaacttccggagtttctttgggtccctaatgctactcttcaggtacctggatgcgtaactgtcatagctggggttctcctgatggagggagagagagtttgtctgcctcttcctcccatttccctttgtatctttattccacttcctttgctcctgtcagtagaaaggggaacaggcaatgtctttgccaaactgcccctataacattagacagttttgtcttgtctacagccataccaccatgaatgtgcctgatcttgtctgatcttggaagctaagcagggttgggtctgctaaatacttgggtgggagaaaatttcatcaatgtctttggctcagcagttaatttgcaaattttaacttcaacatggcctgcaagggtttgggaggggggaatgtcaggacagtgtttgcagaccaaattccacttaagggctgaaaccttagatagccaggtttatgctgggtcttagagaatcccatgactagtagcagagaccccataaaagatggagacgcagtggatggggtagcagaacccaaaacagacctcagtgggactctttatctctgcatggaaagcactagaaggggtcaactgggtaaaaagagagcctgttgggcccagacaagagcgaggatggggaaattgggaaagaggaccaagaatatgataggatctgcagagctgctcctgctaaccaaaatgtctcttgggctcaggagtgccacaggtgaggcctggcaggagattatgctgtcatgccttggggagaagggctgtgagcctgacaccaccgcaccatcagggcagaacgagaacgaacgctgcggcaccgatctggcctacgtgtactttgtctccttcatcttcttctgctccttcttggtgagcaacattgtgcttttgccttgctatgtggcccatcccatcctacccctaaccctctgatacatagaccggagatgtttgcttcagtgtatgtttgtgcctccctcccctcctctctccacacccccaccatgcacacactcacactcacgtccacacccaggttaagaactagatcatcctctggagaactcttggagattagagtgcctgtcagactcctggatgggtgactttcaatgattgagaaaagtctttgttggttctagggaaagattgttgtgaaaagggaaggtgagcatatttaagtgcattgagcttcatatcgaatctatggacactcagagtaatcctttgtcatacctcaggtattttatcttataagtacgtctatggatatcttcgctttgggagatttttgaactgcttgagaaaaggtaccttgaaaatgcaaggttatggcattgataagagtagaatgatgataatggaataaatgtggttctctcttgacttgtaatgttattacatttgatgataattgaccagctgatagatgagaaagaatgagattgcttgattgctttgggtgttagtaaatattgagtagtatatgtggagcatacccacctataaagtggtgggaagccctacgtgcctctgaagtctcttttggagaaagcatgactcagcacacccacttccagaaacttctaccctgcatatcagacaagcagtgataaatagaataataaaagggccagtttagtgtttctggtcactctgaaattcctcagctcaactacactgctaatgccactggctgtacaaaaacctaaaactaagacagtgatgccactgaaaagtggtcaatttcatggccatgcatcaaaaagtgaattaattgtcttatgtccaggcattgctaccttgcaagtgatcccaaggggactgaaacttcccacatgtccagctctccagtgaggggggtgggctacagaaagaccattaagtgttgcctgtaggtcagtgtggcagggagggagctaatgggagatgtgggcagcccacgcagtagtcttggctttgttcctctgctagcctgggccaagacactttcccttttatagcatctataaaatgggagaaaaaaatgacttaataataggaacattttatacacaatgaactgatccatgtgttttaatacacttccttcttatgtatgtgaaaggtttttcagtaaaaagaaaagaatatacaacagtatcttatttacaaatatggaagtataatgtataaagaaaaaaccccctgaaatttagaataatgctattgatgggagttttccatttattcacatcttcagcacatttttattgagtggccattgtgaggttcactctcagcaaggcccatccctcagtcaccagtagtcaaggggtgaaaccagctcacagcttccaggaatcggtgctcactgctagggtgaaatggagcagatagaagcgcatgtggacatcttacttttatcttatatggtttaagtgtttcataataaatatttaaaagaaaccaaagatataactggaaattaattagggaccttaaaggtacttttggaattttgagacagagggtgctgcataattcacattactgttatttttaatgaggctatattcagcacgagatgatctgctttcagatctatatgagactgactgtgaccttggacaagtcacacagcttctcaactcaaaccagccactctacagagatttactgatgcctctacgatgtgcccgaggccttgtgctggaagctaagaacaaaaaatgtgaatccaaagcaattctgtccttgaagggtgatggtaattaaacctgcctcacaaagagttggagcaagcgtaacaacaagtaataggtgtgactgcacacgctacactcttaatgactgttcaaatgaaaggcagtaacagtgctaacagttttcattgacattaataataggtaccccgaaaagtatacaaaagaaatgtctggatacatggaaaaccctttctgtctcttgtaagtgaaagggtcctgcctgataggtagtagttgaacaagttcactgtggctccaacctcagaggcagaaagacaggcccatgttgggattaggttcgcctgcatgagacagaaatctccagataacagtggcttaaccaggagggatgctgatttcccttccacatcagtgaagtctggaggaaggcaggcagtctgtttatggtggctccaaaggggtgttggggccccagacctactcctgctttctgctccatcacctctgtggtgtgtccctcatcctcatggaagagaagacacctagacctccagccatccatctctactctaggcagcaggagaaaagaaggaagagaagagtctggctgttaggtatgaccagcagtctctgtgttgtagaaagactccaaccatgtccttcctccacactgtctccttatcctgtacaccctgtctgcatatctggcacctctgtgcacctggccacttggcctgggggtccacaatagagactccagttttcccaccagttgttatctatcaggcaggaccctttcacttacaagagacagaaagcccagctaaatctgcttcagtaaagtgggattttataggctcctgtaaatgaggagtcctggggcagagcaggcttgatatggggctcagatgatatcaccaggtccaggtttctctctatttacagatctctgcctccaccttgctccatccttgtgagtgcaaatatcaacatctcaagatggctgtagtggcagctctagaccgcacattttcacacatttaagagcaacaggaagaactattttgcccagaagattcaataccattttattggttttgatgggatcaccaaccactgtgcccagggaaatggggtttaatgactagttgaggcctgggtcacaggagggcatcccactgaatctcactaacttggaacagccaagaacctgggccagaaatacagtgaatgggtgagcagggcagccaggaaacaaggaaacagtgctgttgaacatcaagtcctgtcgattccacctttgttaactctctactctggtctgtgctgtcgtcctgcccctggtagattcaggagtactgcaacatcctcccttggtttcccacccaccctacatgctgctaccaagagttctttctgaatgcaaatgtcactttatctctctcctctctaaacccctttagtagttcctgttgcttacagaacaatctagatcagtggttggcaaactatagcccttgggacaaatcaggtttaccacctgtttttgtatagcccatgaaataatggcttctatgttcttaaatggttgaggaaagaaaacaaaagatgaatgatgtttcatgacgtggaattacatggaattcaaatttcagcgtccataaacaaagcttaaccagaaccatcgtgttcatttgtatacaaatggtctgtctggtgctacaacagcaaaactgaatagttacagcagagaccacacagcctgcagagcctaaaatatttgctatctgaccagttcaccgatcctggtctacactctttagctcagtgtatgagatgcttctgtgatccggcacttggatccagctgctccgccctccttgcagatccctgactattccctgtccctgcatacctctgttctggctcgtttgctaaaacaccctcctccatgccctgaagcctgttcttctgcttcctgagctctgctttaggtttcccctaacccctcttcttccccttgcccttcagatgctcaacctgtttgtggccgtcatcatggacaactttgagtacctgactcgggactcctccatcctggggcctcaccacttggacgagtttgtccgcgtctgggcagaatatgaccgagcagcatggtgcgtaggcccctcggccgccccagcggggcccagagcaaaggtctctggagttcccagggaagaggctggaattggagccacccaaatgcctgcctgttacagaaggaaaggagattcctcttgattgtggcccatagaagaggctctggtatcaagccagtcaccaaggacttctgtatcctcctttcccctctctttccttctgtgacagggttttccctttgtgggctggtctcatcatccagtcctcacctcagattatttgggctcagtcccaagagaactttccaataatctttttctgccaatggttagtggactcctttgagttatcagggggtttgacaagggtttttggccagctggacatctggccaccatgatcagtgactgtgttttctctttctcgttcctctcaacagatacagttggatataactctgaaattattttttaaaaaccaaacaagttgttcttccaactgttcccttaaatatttgtggatttttattacatggaactaaattaaatggtaggaattggtgaagataacttctttactgtctcttttgctgtttagtagttctgaagtgatagcgtgccttctaggctctagagcagggattggcaaactacatcccatgggcaaaattcagcccattgtctgtttttgcaaataaagttttattgaaagacagctcaaccattcgtttacgtattgtctctggctgcttacatactacaaggaagaggtgagtgattgtgacagagatggtatggtcctcaaatttgaaagtatttactacagaaatattaggttggagcaaaagtaattgtgggccatttttgcaacaacctatatattttactgtcaaaaaatttactgccagaaacatttgctaatccctgctttggagtataaaggcagcattttggccctcatggctgaggacaaggtgagagttctatgaatgcttactccaaaggaactgttctgttccaggtcattttagcttttgggtcttaactcaccaatcctctatccattctggtccccctctgaaaaatactacaagaaatgttatcctttacaggcatggaccaagttgcttccacctggaacccccttcataatcagagacttttcccaaaaatctatcctctggtgaggctgttgaacttgggtcactgttttacagactagaagggtgaatcagaattctttccttcattaattattaatgacttagggtacagagttatctaaatccattcctattacaatggctgagcaacagctttttctttctggtcttactttctaataaatagatcttagaaagcaatgggcagtgtgttagaggagaaggcagccaggcctgcgtgtcttcagctccatggccttggacaagtcacgtaaccactctgggcttctttacctgtaaaatggtgatcgtgatacctacataacttgcaaggtgtttgtgaggatgatattaaatcatgtgtaactgttattataatcaacaataaccacacgggaatgctaattggaatgtctagaaaatcagcctctgttaccatggatatctatgggattgggagcctaagaagggacctcttcactcacccaagaggagaaaccaactgtgagcaaaaaagtccattgttcatctgggctcactcaggtatccttggcttccagaaaccccagcttcttgtggtttcacttatcttgggatccaaatgctgtgtgtataaaacatgctcctccctacttattccagttgctgggaagaaatgattccatgaggatgaatcatgagactcagacgtgtggactgggaaagagcataaagacaaagaagaatttcttctgtgtgctttgtaattcacagtgtaattcattctagttagttagagtttggttggctttctttataaggtgggtgaggaagactaacaaaagtaatgtgagccagtgtcttcaaaaggggggctgaaaccagttgcaaaaaatgtcagtctatagccactcccaacccacctacttcccaatctcactaaggcaaaatgaaaggacaactggctaaattacctcctctcaagagttgagagacttggaggtactgatgagctgctatctggaagaataggaggaatcaaccctcaaatttcaaaaagcctagaaagagtaaagctgggctgaagcaatagtctccagacagttgcaagcaaggactgaatgcacagaggtggagatgttgtgcttataatttccagcggaaaccctggtctgttccagggtgtatacagacctgcagatccctgggtgttgcttctttttctggacgctgacagagaagatgctgtagccactgaaaattaatcaatcattaattctatcccttccataggaagctggtactctctaatgggctcctgggaaaagggttggtaagatagctagaattctggctggctccagccaagctgctgttggctgagtggcagaaagagggctgcggggagagtgtccatggcttcctccctggctgctctctgaacacagacctcagcaggctcctactgagtaaagaagacttgcccaagctgaacgcagaaaaatctgtcacaaagagaaacaaagccctttgtgatttccctcatgccaactgtgctccttgctaattagcctaatgggaaatttgtctcttccagactgcagaaagccgctgacttcccactgcccctgaaaagtgggtctgagtaactgactgtaatcagtgtctgtgaaaagcaaacagttctgcagtccacttcaaggcagcctgacatctgctctggacagcggtctgagtcatttgtgaattggcaggctttgttcctagaagcctagctagagccagggctgtgtctgcatctggccaggtatggtccagataggtataatggggtgctcttggtcattaggcagttccctttggcattgaccaggctctgatttccttagaaaattgcagcagtgcagtttggcaaggtaatggttctctggtgcttactgttttcagtctctcctggtctggctttgccaggcccaaggaaagaagctgctctgacctctttcagccatcctcttcatggctaagctgtcatttcttttctacccttctctgagtgtcctattaacccacctgtgcttcctttacagcggcaggatcccgtataaggatatgtacaaattagtgcgggtgatctcgcctcctctgggcctgggagagaactgcccctacagggtggcttgcaaggtttgcctcccagtccccagccatgatctgccgtgggatgcaacatctaacccctcctctctgtcctctgctccaccaccactgcgccacatgagggaaccttcatgttgctttcctttgagtttaaagaggtccaaacccttccagaaccagcagctgttacataaagataagggcatacttggggaaaaggcagaagagttaagaacttcatgtgaagaccagtgtgatcgctctcttcacatgcacacactcatgtatgtgtgtatatgcacatgtacacacacacacacacacacacacacacacacaggtccaccttagtctgtatagttaatcagagggacctctcctttctctatagaatgcagaaatatttttaacccagcaaaagaattctggcttcttttcactggagatggagaagcctcattttagcaaaagagcctcatcgtcccatatgtaatgtatggagtatgatcctagtgatcccaccctcccagctcctggatggtctggtcagaatgactatgaaagctataggacagaaggggtgagaaacaaggaattagggcaagaggtgagagtaggtaaaagaggcatggatttggtgctgtgtggaagaaggtagtaatagctcagagagtctgggaagatcacagtgaatgaagcactactgagagagtccctaccttagggtcctgccatgggttgctgtgagggatctgagggagctgtcataatttccaagtcacttcttgtcagttacaccaaggatattgttcaggggtgagtaggacctccctgctcaaatctgccatacccagggaattctctatatcccaatggctctactaagcccctatgtgaggccaagcctgctaggtaaggaaccctctcctggtgcaagtggagggaagcatgggctccctggggcatagcactgcccaggcagctggaagatgacctaggctcaggaaggatgccagcctggacaatgggatagagctggcctgggatggtgacacggtgattccatactcaggaggctggacagctgcctctgctgagactctttaaactccaccctggtgaaacccgcagccgcatgtgggagagctggggagggtagcatggcatgcaagatgctcttcctcctcctgtttttgtttcttctgtccccagcatgccattgacctggcacatgctggggaataaagagcagtcttgtccacagagccaggtggaagcaacggggccaactctttgagcagcaagcacagcccaccaccttcagtgcaagacgccgcctcctgctgcacacacacaccagaggggggatacacgacgttctgcctgtgggttcagtggagaacagcctgacttccaggccagcgccccagccggggtcagaaactccaacccatggctggagcaccgtctatccggtttataccactcacacacagccctgggaattgaaaataagctgtgttgtattggggagggatgaagtgaacagggaagtcaggggaatgctaatcgaggagaaaatgagaccccgtgactgttcccatggagagtcatagggactgaaggttgccaccagttttcccgggtctgtgtggggcgtgatataaaccgcaccaggatggagtcatgtctacgatttgccttgattaacaggtttcctattcttttcccgtttgtccattttgttttgtttttcttctcctgttttctgtattttgttcgtttttgctctctgggaatgcctattctcctctcctatctttctgcatccttctccccacttccttctcctttccctgccaccccactgccccgctaacccaccccatcccaactcaccaccctccatgagcagtggccgcatccattacactgagatgtatgaaatgctgactctcatgtcacctccgctaggcctcggcaagagatgtccctccaaagtggcatataaggtagaccaccccttcctttgctctgggctacagaccaacaggaaatgggatctagttgtggggaggccagaacatggggaggaagccaggctggggaggtggaggagggaactaaggaggaaaggcacgatgagactgaagagtcaggaaggttcccaggaggacgaactcatgagacaatacaaggaatggtttttaatactgttcaacatggttttttatgtgatattttgtgtttctacaactgtgtggcttcttgtgagtgagttacctgacaagcagtgttaagtggtgtgtttccttttagaggaggcagagtggtggcctgtgggatggcatatatgggcaagaaggaagcctacagcaaaacagctatcagtgctcatatgcaaagaaatatcttcaatcagataaggaaatcatgcagaaattcctttaaacgtggaattgttaggagaaaggaaaattcctttaaacaagaaatttttaggagagaggaaaactcataacaaatgttttcacccatgacataggaagaatggcataggttccttctaggtgtaagaagaaaagaggaacctgtcttccatcctgtgatagactgaggaatgcagctctattccactagcccagctacccaattctcttggaaatactcaaaaggaagggaaataatgggcacaagttgtattcagcattaaatttgacttactggcataacatagttatggggcctggccccagagttatgggtggattcccctatggcttgctgtttagagattattgtacactgggagtcacttgcccttggggtgctcatagcttttggacatgagttgttttgccacccattagtaatagttactgttagttcccctttgctatttagactgacccagaactctggagctctttcattcacctaggaacacatcatagtaatgtttccacttctctagatgtttaaagaagtgggagagagatggaactcaaatccaaacaagaaactggctttccactctaagacaccatgtggcatcagctttaggcaggatgctgcaatggaacattagagacccttctttgggaagaggtacttccctctctgccaggctggtggttctgccagaggacgttctcctgctgctacctcacattgtatggccccagatagcatctcactggaacatggccattagggaccctcattccccccagtacatggctcctcgtgcacagcttaggggctggcatcctttttgctcacgatggccacatccaaaagtaccaggtggtagaatgtggccttgaatttgtacctctgggatgaagcttggtgggagaaggggagcggggattggaggaaaagttaaagagctccaaaagcaaaatactctctggaaagtggatttggccatttcagtgtgatccctttctttgggtaaggggaacaaggcctgcccactctgctcctgcctgggccacccttcctcgttctgtctcctccgctctccccatcctcctaccccagagcctgtttgcactctcccccttgtccatcctgctccacctcatcctttagacaagttggacttatgcatgttcaatcatgtgcgggcaaatttcatctattaaagactcaaaaagggggcaccaggatacatctttcaagttagataagcaaagcaaaatctcatttctcactgtatttccatatgagtttcagggggtattcatgggacaagtggaaatatggagcagccttgaacaggaaatggagccacctccccgagctgactcctttccttgagccacttcttttagaaatcacttcccatccctaacaaagacattcttaggactccaagggggggccttactgaatgattagggaagccccttccctttggaatttggcatcattcccttggtggagaaaaaacaaacaaactacaacaacaacaacaacaaaacagcagcaaatgagccttaagtgagaagcagggagagaaggactggggcaggggatggggatccttgcccttctttttcgtctgtgcatttgacctctacccttttcttcctttctcactgagatgtctttcaattttttttttttttggcctgctgtttcttttttctctttcacacagaggttggtcctgatgaacatgccagtagctgaggacatgacggtccacttcacctccacacttatggctctgatccggacagctctggacattaaaattgccaaaggtaagcttaggaagggaggtgggaaggaggaattctggaacaactcatgcaggtggcacaggatggagatatttgaactgtcatctatccagttaaggacacaacaatgcagtcatctgaacatcaagtatctgactcaataactaataattgccctttccttctggtacagtgaatggtttgataatctctagggcttctttcagctttaaaagtatatgatcttcagtgtctggctcacaataggtattctagaaatatttattgaccagaggttaattttgtcctttttttctgtatatggtttattttctctgaagtcttgagaggcttctgtggcagaaggtgctgtcatagaggccatggtagtgttttattcctcttgatttctaatgattgatttaggagagaacaggcttactactacttccaggtggacctttagcctttctgcttttgtgcaatctaaatcctttttaaaatcaggtcactcagactatggagttagggttgctggagggattgatgtatggataagaaggcagaggaacgtacttgcggctattgttattttctcctctgatgtattgagcacctgggaggcttttagaacgaatgaggaagttgctcttagtctgagggcctcagatctcttggcaggatatccctgagtcactgaaaaagggagccaaaatgtgttctgcttcttcagcagaaagacctggtattgcaagatccactgtcactcagtgccaagatttcctcttaaaatatgaggtgccctgctgattcagctcctaccttcacctcctccctcagtcctggttatttctgggtctattctatttattagtaatttatcttattctaggtggtgcagacaggcagcagctagactcagagctacaaaaggagaccctagccatctggcctcacctatcccagaagatgctggatctgcttgtgcccatgcccaaaggtttgggtcttctcctgggtatccttgtcactgtgggcccagcatgtgaagactacgtctttggggggaacccagagtgatcaaagagataaggaaagtttgcccttttcaattaataaggacaaaagggacttaaggataaaacatgttctttaagataggtcactgtggttgtggatgagacttcctgggtgtatagctctctccctccatataatactgctcagcaaaccttcatgggagaaaggatgttgtcacttagctatagagatttagaatggtaggcgtgatgcttactcatgtactgcttatcctcagtatcgtcaccatcactaggtgggcatgcaagccccctgaggacagatcaggggatctatgcactctgcatcctcagatcctggcaccatgggggccctcaatatacattggatgaatgggtgactgatagcacagacctgttccagagagtgggtaacaaagcttagaggttcctcactctctcccattatctactccctgttcaccatcatgccacatttgtgtttctagcctctgacctgactgtgggcaaaatctatgcagcaatgatgatcatggactactataagcagagtaaggtgaagaagcagaggcagcagctggaggaacaggtgaaagtcaatgccagcatgctaagtgggtgggccatgaggagttgcaggagggaataggcctgtgcctccctggggcatagtgcccggcaaggacttagaagcagcagtaatgggtgcggggcccaagaactttctagtgacgtggaattagaaacccagtggatcgaaggttaaaatggtcaaacaagggataagttatgtgcctgtattatccatgttaattttattttccccacagcaaactccgtagtcattggaattctttccttcttcttccctctttttacccagaaaaatgcccccatgttccagcgcatggagccttcatctctgcctcaggagatcattgctaatgccaaagccctgccttacctccagcaggaccccgtttcaggcctgtgagtagcaccaaaacatccctggcatggctgtttgcaatctgtcacccatgctgttgtgcagaccccaaaactcactgctcagaagggcccaagaacaaatactctgagcttgagtgatcctttttctgaagttgaatatcttaaagtgattttcagcaggagtaagagaaaagcagactaagcatacttagcactgtggtcaacgtcggtgatcactttgaatgaacaatagaagaagggagtttgacttcttttaatatacttgggtcttatagaggagattatttttcttcacaacagaactacaactaattcttgattatcgcttccccgtggatctagtgtcctgctggaagatagagcctccctcacaggtgccatgctggctgagtgtaagaggggaataaaaccagcagttactgctttccctgaggttgacacttatagagacactatttgcagaatctcacttgattcccactctagcagcctactataccctggaggtatatattaatatcaccactttacacatgaagaaactggagactaactgaggttaactacgttgcctaaagtcctgggtagtagaatgtggaactggaatttaagttccttatttctgaccccagagtgttttcactataccatgttttctttaatgaacaaaagggaccttattcagaaagggaacttactttttctataataggagtaaaaataaaacacaaattaaggaattttcccatccttctgagtgataagcctttgccccaattaatctactatagcatatgtatctcataacattatatttcgatcatcagcaagcatttagtgcatacctaaagaacacaagtatttctactcaatgtaaatgagcttttgtgattgggtttaacaaagtcccagttcttacaaaaccaggaatcaccaaatcgcttatgttaattactaagagagtgatacttagggcttgggaatgagacttctgtcggagtcatttggaattgctcagatcattgatttctttctgcctgtggggctggactgtttttgaaaagcactgttttcagagatcaaagtccaacatctttggaagagaagaaaaggatgagagtcatgaccaaggtcattttttttttaaataatttgatgttatgaagtacagtgtgtgaattctcctgtccacagaaaacaagtcagtgtttatcttctgcttgtgtaggagggagggagggaaagaagtatgattggaagagtgggacctcttcactggaagggtttacactgttttttgtttgtttgtttttttgagacggagtctcgctctgttgcccaggctggagtgcagtggcacgatctcagctgactgcaaactccgcctcccgggttcatgccattctcctgcctcagcctcccgagtagctgggactacaggcacccgccactatgcccagctaatttttagtagagacggggtttcaccgtgttagccaggatggtctcgatctcctgccctcatgatccgcctgccttggcctcccaaagtgctgggattacaggcttgagttgtttttgttttggcagtccttggcttagaaatgggggataccaccccctaaattgcaatctctgtttatctacaatttgctttacaaattaacccaccaccataggatcactctgtcttttctccatgtatttattgatccatttactcattgatttttaccaatatttattaagagccaatatgtccccagagctgacttaggcactggggctatggcaaagaacacgtccccatggagacaaatctggaagaagaaattacaagagcaatacaggcaaacgatgctgaagggtgggctgttgtgatgtcatggaaacagctcactcagtttgagggtttagagagtccttcctgaggaagtaacatttgagtgagacttgaagacaagctcttcaagagtggtaagagaaagtatggtaagtttaaggaacctaaaaactgtcatgatggttggagcatggagagctcaggggatgtgttaagttatggatttggagagatacacaggggctagtactttgggggcattataagcaggataaagaaattggattttgtctttggataatggggttttatgcatcagaatcatgtgatcagatgtgtgctttcttgaattcagtgtaggctaaatggattggagggaagcatttctagaggcaggaacaccatttcgtaggttactgcagttgtgtaaattatcagtgatagtagcttggactagcaggatagagatggagacagatggtcagatgtgagaaatttggtagataagactggataggatttggtgattgatttgctacttggactaaaggggaaggaggaagcaaaggattctgggtgaagcctttgggtgcatgttggtacatttcctgacattgggacactggtggaacagcaggctggttcctcagaaccatctgtgtttctagagccatgcattgttcagtagaggttgatctaggggtatagtggtagacataacagatagggtcgctccctcaaatatggtggaaaaccagacattaaacagaggattattggaaagaagaaaagttgcattttcagtgatttacttacagttctgataagtgctagaaagagtttacagagtggtaggggagttggagagaagtgttctgcactcttagagtggcctctactaaaatctcgaggcagaaacaagcctagcctatccaatgaactaaaaaaggccgccatgtctggagttcagggagcaaaggggaaagtggtacaagaggaggctagtgacgtagggaccagatcatgagggaggctgtgttcagaattctggactttatgccccggcttgacaaggttttcaaagtaggagatcactctgggttccagttatttaactctgtgagattattaagtgattccaagggtcctctccctctagtgaggattctataattatttactctctgtaggacaaaaaggaacccatttctttctttctgagacatgatctcattctgttgcccaggctggagtacagtggcacaactggctcactttagcctcgactttctaggctcaagtgaacctcctgcctcagcctcctgtgcagctgggaccaccccaggcacgtgctatcactgctggctaatttttttgtagagacaggtcttgctttgttgcccaggttggtctcagattcctgagctcaagctatcttcccggttcggccttccaaagtgccgagagtacaggtgtgaaacacagtgcaaagccgagaactcactcattcttatactagctgtgctcaatcttgttcccagtggttctcaggagatgccacaagtggggaagatgactgacatttaggcaggtcatttaaatactgtaaaaactctgtagcagctgtgaaaactcagcaaaagctctcattggaagcaaggggacagattaggtgattctctgctcttcatatcttctcctgtaatctaaaaaaacattcctatggattgtttttaagtaattggcaatccttgctcatgccttgagttttccattggatgcagagtcatcagcagtagacttaaaagagatggtgtcccatctctccctcctaactccgccaccaagagagctgctgcccagccactgaccccagtccttcctcccataatctggaagctcactctgcattcttgagcaggtcagatggtagctattaccatactggtggcagtcagccaataatttggcaacaggcacctcattctccagaaagcttggctgcttctttctctcctaacaagcccagtggatcccgtcaggttaagagtatctggaagtactagacagtggtttaataacaagcctactgtgccagttctgcattcttttcccttggaggcctctaaacaactgggcagactttgtctccatcctcttttctcaccaccatttaaacctcttcctacattgccatcaaccaagaggttttcaactcctcaccaccacctctgaaatccttctcagttcatgaaccaacagacttaatgtatggtacaaagtagtccttcaataaatggcaatggaattggacttaattgtttagtttggccagggatgttggcgaaataagaccatattcttactgcgagtagggaaaatttttaaaaagtccatggctgcttaatatttaaacaaactgttcactgtgtaaactagggtgtttttccgccaaatggggaaactgagcagaaataggtttacaatctagtgttgctcttccatatggctgaatgtgacaaatgatgtcatttgtcatagacatgctagcccccggcagaataatgaatggtttcaaaggcaggatgcaggttgaaaacatcagtttctgtctcttctagtgcttttttttttttttttttaatttcaggactagccacatgtaagttactaggtttacaaaagccagccaaggctaaagggtgttgccctgctggggtgggaattgctagtggcatgactgtccctcattacctctggatttgacattgcttttcaggagtggccggagtggatacccttcgatgagtccactctctccccaggatatattccagttggcttgtatggaccccgccgatgacggacagttccaagaacggcagtctctggtgaatgcatgagttatatgacctcaaaactacttccttggtttcctgatccctctcactaattttattacatagtcatggtccgtcaggaaaatccattctagtagtttagccagttgccctggaggtgtcctgccttagcccttttctagcccagtttctcatgtgctctgacaatgttccctcttcaggttttacagtcccagaggtcccttccctgcagcaggaacttaaattgctttaggccaagccctcttagtttatgcccgaatatcaagtgtaagaccggaagtcacttataaaatcttgcctttgatggggagcttgaagatgcatcaccagagaatgagtgacaccaaccctgcctcttagtgtagttaggtactgcttgtgggacacacaaatgccccatgccattccttagtgatgcccacctcctctagaacctagcagcagcatgtgccacagtgatgagctgcctgccaggaggcacagaagactgtcttacctctgctctgtgtgggttcaggcacattgtcccttttggtcacaattcaaagacattctaacaggccactaaagtcacttccctgaccccaaaatgagtttattagcataaatggtgaaattcctggctgggtgcagtggctcacgcctgtaatcccagtactttgggaggccaaggcgggcagatcatgaggtcaggagatcgagaccatcctgggtaacacggtgaaaccccgtctctactaaaaatacaaaaaaaattatccaggcttggtggcaggcacctgtggttccagctactcaggaggctgaggcaggagaatggcatgaacctgggaggcggagcttgcaatgagccgagatggcgctgctgcactccagcctgggtgacagagcaagactccgtctcaaaaacaaacaaaaaagcaattcctgagagacctattgagtcaagtgaaagcctgaagaagagaggagagattcaagttttggcttagctaatacaaagctaaaatatggttcctaaacatcattgactttaccattattcctagttcaggagccatgagctcaaggtcccccaccccgaccttagcttagaattgaagcccaagcagtcactggactgaagagaaaaaaagacaaaacccaaccattgcaaaagtctgtacagacagcttgtactaagtgagttccatatcatttaaattctgattcatctgtggctcttctctccccttcatttctctcctgatccctccccgctgctactgtgtacctcagagccaccctgaatgatgtgtgatggaatgggcacccccacagagggcgaaaaacactcagtagctcaaacaaatgcgtgcttctatctcctgcgagtgctgagacagagaatcgtgcatggttgtgtgggggagacagttagtccagacgcccccagggctgagcaattgactgcctgagggtgttcttgatgaggcaggtaggaactagtagagtcattctctgccctcccctctgaggaacttagcaccaagacctgtggaataataaactatagatagtttgattcttaaaaagacctcgcagcattttgcctgcctggcgatgtgtctagtgggaaaaaaatctcaataatgtgtcctttctttcacagggagactttatgacatcatttctgcgggttccccagggctgagccgtagtgccaggactttttggatatgtgttcatctcattgtcagtaccagtgtctgtaattcaatttaggtgtcagcctgtgctacacactcaacactgtgtacttctgcccatccctcggggctgctgctccatgtccccaggcgtggccatgattgtgtgtgtgcatatggagtgtgtgtctcacaccacctctgatacctgtagactgcagtgttgttaccacgtctgtctggagtcagaactgtgtgctatacaaagcatgtactacaaacaaacactataactccctcaagtgcaccatagcacatgtcttgggaaagtacccctgccatacacaccagaaaccgctcagccaaatggtcacataggctaaggtgggggtcccagacactctttcctttgggcaatgccctacctgtttttagggtgtcatttcctaaatataaaatagctttttctggtacgatctccatctgcccaagatgttcttaggtctttttgttaggtagcccacgtaaacatctctcatacagctctttatgcaatgatactagctatctgtatagcgcatgcacagctgccaaacaagaatgacagaaccttagagatttccagtccaacctgataacactgtaggctggcacagtccaaaacaatagctcttagccacatgtggctagtccaaataaaatataaactatctaatttttatattgattacatgttgacatgctactatttggatatattcagctaaattaaatgttattaaatttcaccttttacaacatggttaacaacatggttacttggacatttaaaattctgcaagtggcttgcatcatccttccatgggactgtgtcactcagggcatccctgacagccacccaccacatctttggatggtttcaatcagaagaaaactcttaacgtcacgtgtcttaaggcttgagaagacgtatttgacatcagaaattgttgacttcccttagaaaactggtttctatttaattgataaaaggcttcttcagattaaaagaataaatccaatgctatcacttcttagaaagcgaacttcacatatctgaaaagtattataccaaacagtgtttgttgcagaaaacaataaaatctgaatcattgcttagtgatgaaaaagaggaatctacaccagaaaaataggtgaccttcagcactcaatcccagctagagcttcctgtccggaacatatagcacataggtgcacataaacacacacacacatatacatacaactgagaccttaaagctgcaagtctctcttttgaaagccattcttgaggaggctgaattgtccactggacgtgagaagcaatgagatggaaccaagtcccacaagcttggctgtgtgtttatttccaggagccagaggttagtgaattaaaaagcgtgcagccctctaaccatggcatctaccttccttcggacacccaggagcatgcgggatctgggagggcatcttctatgccacgtctgactgtggatccccaggtaaaaagcaaccacctacattaatgcagtggcatccgggctgtattagctgggttatggaataatatctgatatttgcaggtgagccgttgacttgcccgcaccccttccctataaataaaacctggctcatgggtcgtctctaatagagcctgcttctccggtgttttcaatgaccccccctaaccacaacagcccagcgaacaaaattgcatacttcactccggacgggttaaacattctcaagattcaaccagccatgcaagaaatattttccaggattttctctgtgtacttctccatcctttttttgtttcctgactcctccagcacatatgcagttacttacacacacaggtctgtgtcaggactgtctgtcctaaccagtgcaggccacatctcatttctttgtctgttttcctggcttctttttcctgtctgtcggtcttacatcaggttttgacagagacaagaagtttttgtagatttgttttaatatctgtggcaaatcaaaatgccagaatttaaaacggggctaggtgggattgatggcagcagagggagagtgatacattcttagcacttgttaaattgcaagctctcctaggctctagtgctgcagggcagggccttctctggcaagggcgtttaaaaaaaaaaaagcaaagccatgcttctttcatgaatggggtggcctcttagacaattgccctcacatgtttcaaagcagcacagtatttgctgcagcctggctgcgccccatggtagagggctctatgggagcttgcacagttcctgcctgcattccgcatggctttgccttggtacactcagctacagaagaaaagatcctggaccatttccagtgactatattaacataatgtaaggatgctttcttgaacagtttccaccagctaaggtttgagcaagagagattcaagggaagttaccatttccaggggttacaatttgccttccttaacgtctcagtcttgctgcttctgtccttttagatcttttcaatcgttaatccataccttgtgtttctctgggggcttgtatttccaggtggtgacagaccctagctccatgagacgttcattttccactattcgggataagcgttcaaattcctcgtggttggaggaattctccatggagcgaagcagtgaaaatacctacaagtcccgtcgccggagttaccactcctccttgcggctgtcagcccaccgcctgaactctgattcaggtgaggaggtcttcagtgtccagctctttcatcaggcagtgggctcctgccctgatgcacttactctccaaggactgtagataaccagaaaagaattcagagacaagggctgaagaaagtgaaggatgctccttaccaaagggaattcctgtatctgacttacatcctgaaacaggccaaagccctcctctgtgttcaccggaaaagctgttgcaatcccttccttctggagcagggctatacaaatcattagaattgagggagcttttcaaatagccttctacaaaaccactggggctttttaggattgtattagagacccactgtaaggactgaactttaaccaccagttccacttcaacctaaacagtgctacctggagttatttcctgtgtttgaatttttttttttttgagacagagtttcactctgcagcacaggctagagtgcagtggtgtgatctcggctcactgcaagctctgcctcccgggttcacaccattctcctgcctcagcctcctgaatagctgggactacaggcgcccgccaccgtgcccggctaattttttgtatttttagtagagacggggtttcaccatgttagccaggatggtctcaatctcctgacctcatgatccgcccgcgtaggcctcccaaagtgctgggattacaggcgtgagccgctgcacctggcctgaatttcttttaagctttttgctatatatatatatatatatatatatatattagtctggctcaactattttgttttattggataaaggaatcaaagttgaaaaagcagtgacttgtcccatgtcatagggccattaagtggcagaactgggactagcactgggatcctttcatttcaatcctggacttctcaccatagcattatgttaggtgtgttattatttagttcatagaaatttcttaattcccttctgctggtgccaccttccccccaaaaagttatgcagccatatttatgatagagttcctgagccatattgttaaccaagatcctatattctgtgtagcataaatagaaacagaatagattgcattgtttgacatatgtgtctctagtggcaccttgcaaacttacctgcttacaaaataggtaatttgctagcctgcctttctcccctgcttccctttcagatcatcttttgacatacctggagaagccaggattcttttaggggcctatcttttttcaggctgctacaacaaattaccacagactgggtagattcaataacatgtatttgtcatggttctgtaggctgggaaatccaagaccaaggtaccagcagatccctgtcttctttctattctcacatgatggagagcagagagacaggaagcaagcactctcaggcctcttcttatcagggcactaatctcatcatggaggccccaccctcatgccctgcctcctaataccataccatcaggaacaaattaggcctcaacatttgaatttggggggggacacaaacatgtggttcctctgagggcccaaccccaggctgtgatgtgatacttggagagaagtcccttcatcatcattggtcagagtggacagagttataaccaagtgcttttgtcacctctcacaggccacaagtctgacactcaccgctcagggggcagggagcggggacgatcaaaagagcgaaagcatcttctctctcctgatgtctcccgctgcaattcagaagagcgagggacccaggctgactgggagtccccagagcgccgtcaatccaggtcacccagtgagggcaggtcacagacgcccaacagacaggtgagcgcagagaggaagccagtctacagcagaaggacaggggagggtgggctgtatcattagatgcaagtcgtgagcatttcgcaaacgcattcaagtacccacaaagactggaatttcacaggaagctatacctatagtgcatagaggttagctgctcaatgcttgtgtactcagagatgatctgaattcacagaaaaccagatttcccccaaaaagatggtgtctagaggtcattccattccagccttcagaaaccagagatataaataggttgacagccagattttggaggagaggatggtcctttagccagaaagtttcctttggccatcttgtgatcctcagtatttgtgagaattgtgattcatctctcagcccaggattcacaagtcagagcagttcaccctcatttacctagcttgcagccgtcccagcaagatcatgccttttgctgaaccaccagcttggtgcctaaggaataactatcagatctgtatgaaaacattcatagactctgttttactccttactacagccctatctctagtcatggcattttgacccataataggagaccccctcaacagaaacgatcagcggagaaaaggcagggctgctaatgcaaacctttagagacacagcagtcgagaggtttcccttctagaacaacagttttcaaattttagtgcagaacagcattaacccatgaggtttactagcactgcacattcctggtgcctgaaggacccaggagtctgcctttgaaaagacccctctgtaggattctcagcaggaggttcgtaggtcacacataccttaagaaatgctctcctggaggtttacttcccaaaacctgggctcagtttcccttgggaataggtgagggcaagtatggcctgagccaacaactgagtgtatcaggtacagaagctgagttcagcaaaccacagaagacatgggcaggaataagggtttcccagccagagcaactccagcatttgttcaccttccacagagttgtctttctcaagtttaaagtctctcttttagtgtgccccttgttacatatgtagagcttccttagtagtccaagtgcttgttccacagacctgccacccctagcatcacctggaagcttgttagaaatgcaaaatctcagtccttgccccagatcttctgagcctgcatctgcagtttaaccagatccccagaggtttgtatgcacaaagtctgagatgtcctggtctaaatgttcttgactccttaatctcttcaatccctttttccctgagtggatgtgaatactacagggagctccagctcaggcctctccctgacagaattcagattccaaggactctcttaacagagttgcaagtagggatcatgccaagcccaatctaacatgccatgtctctcctgctatacagggcacaggttccctaagtgagagctccatcccctctgtctctgacaccagcaccccaagaagaagtcgtcggcagctcccacccgtcccgccaaagccccggcccctcctttcctacagctccctgattcgacacgcgggcagcatctctccacctgctgatggaagcgaggagggctccccgctgacctcccaagctctggagagcaacaatgcttgcctgaccgagtcttccaactctccgcacccccagcagagccaacatgcctccccacagcgctacatctccgagccctacttggccctgcacgaagactcccacgcctcagactgtggtgaggaggagacgctcactttcgaagcagccgtggctactagcctgggccgttccaacaccatcggctcagccccacccctgcggcatagctggcagatgcccaacgggcactatcggcggcggaggcgcggggggcctgggccaggcatgatgtgtggggctgtcaacaacctgctaagtgacacggaagaagatgacaaatgctagaggctgctcccccctccgatgcatgctcttctctcacatggagaaaaccaagacagaattgggaagccagtgcggcccgggggggaggaagagggaaaaggaagatggaaggacaccatgcattatcagagaagaggaagtaaaggacaatcagaacaccagtcaaacccaccaaattgctttattcccctttgcaagatgggcactgccatagttctgcctctttgctggggaaagaaaccaggaacgtggagggttattactgcgggagaagggacacgaggatggctttgcttccccttgccccttcccacttttctaaaagctgtggagggatctagctggcctatgtctacactcagtgccctgagaagcctggaagactttctggctcttaactggggagtagtggagaccataggagaggactctcctccctcaccagctcttacgcctcagccagcaccactgccaccagggcaactgcagcagcatctcatgcataaccctgtggcttgcttcccccagggcagcacaggctaagtcaggaacatcggatgccagggagggaggagaaagccgaagcgaaaggggtcagggtgctgaggcaacagcagcaagggctggtctggacaagaaaagccatagcccggcagcccctaccatgagggagacagagaaacagaactggtggtgctggggggtatagccccccatccttgaggcctgtcacccacacagtaggtgctgagagttaggacaggtcaggaagtcccccagggtccacaaaggtgcctgaggctctggtaagggtgaagataaaagtatttaacaaccgctatggcatcaatgtaagtggagtttggtcctagtgccggagcccatgctattccaggcattggctctttagatgccagtcatgggggaaccctgagggtgtgggtagagtagcaggggccacctaagagattaaaaacagagtctgttttccaaccagtgtggaagcaattaaatatacgtaacagtgctacggccacaccagcacctcctggctgaaggtcagcccacactctggtccatgaggcagcaaggccagtgctgtgccaagcccggtaaggccaagtgccgaggcccagccttccctgccactcctctgagagggcagaacacacatatccaagtaggctacccaccactgggtagggatttctgtaaagatgggaaaggctgatagattgaaataagcttctgtgaaagtctggatttactgaggacctcccctgaggagggaccgttgggaccgcagattctgcagctggtgtggggttcaggtcagtttgtcaggatgctttaaggtgattagtaaatatacctcagcttagacttgggctgctccttctagcaaagcaggctccagtggggcctcatcatacaggatgacaagactggggccctgttcaccttgaacatgcccctgggccaagatggggcttcacccctccccagagtaagagctggggctgacagtcccaccctgtcattcctaatagcccaaacgcagaagcactgagcaagagagccctttcttgccaagccagtgctcttttggtatatggcatacagctccattggaggggacacatcactggctttatctggtggaaatgtacctttcccttaagttcctccttagtgccatcacagcaggtgaatgggtgccctacggggccctccttcccccaccaggaacagatggaacctgccacccaggatcctgatctgccctgcactgagcactcagtggataaacactcctccagcccagacacactcctcctcttgggcaggagcaatccagagttgttatttttcttagaaggagcctcttttccctctattttttaaattgaaatataatagctgcatcagccctgaaaagccaaattcaaccacatggctggagaatcatttgtcatggccccgccttctcttctgatactaatggagcttcatgacccacggtcagcccccaaaccaaagttgtcccaacagaggaggccagtgaggcagagacagagctctcccactctcagaccctcttttgtcttcattttcctctcccacttagcacatgtgtgcttgagggtggctgggaatgtgatatacagcaccctgatcctaacaggtgtgattgttacgtaagacgctgatactgggccttgtattgcttttaaagtttcctctgctcagcatcatttcatgccaaagtgctgctatgggctgctttgtgtgcacaaaattgctttttccacctcggaaatgcagctttccctagggggaggcctacaacaggacgaccattctgagccagtgagtctattgcatggtgttttgagaaagggaattttagtgacaccttatgccatttcaagaggagaaatgcaggctggcagagcaatttccagaaatggaatttgcctgcaaatagtataaacaacactaaatttactgtgccaggaaatcttcctgaactccttgaactcatacacacaggtatttgagtcctgaataaagtgttggaaagcactgcagatgcggtcacctgactgaccacctgggttttctattaccagtgaatttcttttattcaccttcccttgaccaagaaattgggtttcttttccctcagcctgcacttactcttctattaagaccagaaaataaaataattttccgttgagtcacaaactcatcatcttgtttggtgttctgctgcctctgaacaaaagtgaatgccagccttcccttgctgggtgtcagagtctgcctcccttgaaaagaggcccctgtagaccccaacacctattcttttctctggttaattacagcagcatctgagaaattccatgcaaaagaagactacaaccagtgtttcagatataccacaagatcaaatttgggcactggtggtccacctcagaagactcttgagtcatatattcagtttctcttgctaatatatgactcgtcttcaccatctcctcaaaacaagagcaaagccaagatagaggaaggtaaaaggaggaggaaaggaaaccaaggcagggagatgttctaagtaggtttgcatttagttacccctcatttcacttaaggctccagacagactccaggtagggaatgcatgctgtctctttctctgtgtctgtctccccatctcctagaggacagagtgccagcgacctctggacaggggcagggctccagccaaggtgcccctgagccagggtcaacatagaatttcctgccccgtgaagggctggcaccagctagcatccccttggctccacatgagtcatgaacacaattgtcagtgggggtctctgctgctcttctggctgaagaatctgtttttcttctgggcttcacttgtagttcctattcaatgtctccatagggcactgagatcaccaagaacattacccagaagctgaagtccaaatgttctagattttgacctctcttgactctggggccacaaagagaaggccccataatccacctctcagccagtatctcccttctttgcacagattcctcccaaccccatagagcctatgtggtgagcatgagggtcgtcttccctctgttctcccatcccagcctctgttttgctgcatgttagcgctgatccagctcctgagatggttaattccacccaatccaagcttatttgcttgcctgactgactccaccactctctcagctatgggggaatattgcattctaatgaaatagggtttggaactcacctggtgctcctcgcaagacaactgacacaaggtgtagggtgtgggggtggacacaatgcccacctactggataaaagctcactgcaggaaaatgaggtctcctggcataatgcaacaaaaatctcatataattttgatttttaaaaagttgttctcaatttttcattacatcctacttctcagccctctggatgtttcatttttttggacaaagtgtttctttagtggttggggccagggacaggttgagggatatttctcggctcatttataagatataaatattatgaggttgtatgtaaagaaagggcaaacgtacagcagaaggggagcaaatagctacctttcaaggattttgagatttgaaggttaaggaatttttactgctatttttgttcatcagtttcatgtctgttatgttttgagatcctcagaggcctagggttagcgtataccaagaatcctggtgagaggcgttgccatgccttggggtgaattcttccccactagctctctcacccagcctacaagtccttctctcatagatcccagagcaatgggcaccgtccaggaggtacaggagaggactttatgatgcaggaaagaaggaagaagtgggtcccttgcaagtggccagacagggaatgatggtttgactccagaaatcaggaatcaggttcaggtttggataacttctctttaaaatatctccacattgagactcttattttaacaaaatccaaacaaaattaactcagggcttgtgacctaacctttgtaagaaggtgatcaaagagatcctacattaataagcactgcctgtagcaccagctttgtctttttgtcttttgttgtttctttcctgaaccaccctgtacatcatagccaggtctaccccaaatagagcagcagctgatggcttctctgctgtctgtggagggagggctcggctgcagacctatggtgttttgtcagctgttaggtgctacagcccacccagtcagagtacatagacatagcgctttaagggacaaaggacaaacagaactatctttgctttccggaggccatctttttctttccttgaatcctttctgctttaaacttctgaggtttatgcatcccagagaggtcacaccaagccaaagagaaaaaattcatagattgtcccagcctacccaaagggcctgaaaagcctctctaaacaaaactcaagatagctgagaagtatgaatggggttcacagcaaagtccaattgatggcttttgaggctgggacacccccaaactgcccttctgtttttgtagttttgctttcttccacccaccctctctccgcatgctgtaagttaggggagttagtatcttgaacttctaaatgcaaaaggagattttataataagccatgctacctgtaaatacattattgaggtttgcatttttatttttggaggtatgaaagagttgagtagaccaagtcaaaagaggtgtggggatttatgtttatttttatttgtttggggttgtttggttggtggctgggtttcttgtaacagacctattctggaatagcaaagaaggataccttggtgatctgcaatgtttctgaatctgtttctctttaggaagtgattgccatcaaatttagtgatatgatatttgagtcaaaaatctgaggttatagtaccagctgtcttttctctctggtctcctttttgtcgtctttctctttctgtctaaattggcctctgtcttttcctaaggacttaaaatataacccaaattaatgaagaactgccccaaaacttcagtgaaagccaaggaggtacagaattttttcaggacatctttaaccaatacaaaatttatgtcttaagaagataatttttacaatagtgtagtaatctgataaatgaaaactattggaagtcaatagttttttatattccagctttctgtattcaaacttgtgccttcagcaagcatctcttcactttctttcccttgtcaattgaaacatgaatgtttggctaactcatgatgtaaagtgtctgttaagttaataatacataatttaaagcacttagtctccacaaagcaatttagaaaaatcttcacttgttagatcccatgaagtacctatgaaattctcagcattgctataagcatttgattttttttaaggaaacttcctgtttaatggaatctgaatccaagatttgctttaatttcactctattcttcccattttcccttattcttcttgttgtctctctaattaaaaaaaaaaaaaacctaggcttttttttttctatccagaaagttgggttttcatgatctgagcttccttatgtctccttctctttgtgcaaacttaaaccagtcatagattgtcacccagacatattctccaacccagcattggaaatctgaacgaatcttttctctttttgtcctacaagtttgtcagagatgagaatggattgctgtgtacattctacaaccagaccctagactttataccaggctgtgccacttcctcttcacttcactcagaggatggccccaaaactgaaaaggaaatgaaatcatcaaatataccaaatccgaatttgactttatttgatgactcaatattttccttccagtactctaatttttttttatggcaatggcctatatggcacaagaaccaccacttaaagcaaatctgttgaacatttttataagggatgagcaagaaaaacacactccaaaattttaaagtgccattaatcaatttttaagaataaaggtaatatgaaatgagggctaaacaatgtaatataactgccagttaaggtagacagtagttgtggtcttagttacatttgatatggagttgtgtaatattaagcagatcccagtggagttagtaaaaacataggtattgagttttaatggctaccaattgggatatatacttagcctgcaggctgaactttagtcagtgtttttctatcatgttgttttgtgaacaagtcaaaatttatacaaagctaccctaagtgctgcaattgcagaggaacttgcctcttcgtgatattagagggcagtccaactccgctcaaactgagtccaagatttgaattcatccagaaaaacaaatggaggagaaaagcctaatgcaccacatgtgtttggcatttcatggctgggacaatggagtagagggtaggaagacaagctgtagaacaaaagcaaagtgaggtagaaagtaacaggtcccagaagaggacagacttagagatgtgtaaccttggatcctctttttcacttagaatatgggtaaacttcttagcacaagactggattaagagaagttctttctgttaaactcacctagggtagtggctttgaaggcctcagaggattaatagattcccaaaattttcttccagacctgggagatggagagaaagaggttcttgctttaaagcggctcgaagacaatctttatgacttcagcaactcttcaacatagtagcaccaataaaggagagattatgttaacttcctagtggtgagaataccatgggatgggagaagggccagtgagtgggatgggaatgagcttcatcaggaacagatttcagactctgcagggtgcaccggttctagcctcaaataacaacattgcaaggaggtggactacagggtccacaccctctgtccttcggggcccatggtcaggccattccctctttgttttgctcctagaggatgagcatgtaagatgagatcaggagggaaattgggtgctctgcctcaggctgttaaaatgctgctacctgcattctaaaacgtgcaagtcatgccccacaagacacctccttagggcagcatccactgtggtgtgccagcctgacacccctgcagtcacggtgtttgaatggcagctgatgctggcccacccagagtatcggtgcatctctcctaaagccacagttcagcactgcatgttgaccaggcggatatcctataatatagatgctcgtttggatccaaaaggaaaaccattaaaaataaaagaaagatgaaaaactttaatgttttgggggggataaaagaaaagaataaataaaaccttgttgtaaagaatgcatcggcctgatttccctcacttgatgtgtttctttgctgctaccagaaagggaaatcatgggagtgaagcctgccaggaccctcagggtaagctggcagcaggctctgcagctgcacttagttggggtctgctcagaccagtcaggaggaattcaggaggctttcaaagtcccaaggacatcctggctctgaaaggttttcttttgttaaaaaatgcactttgtgctgtgtgtggtagctcgtatgtgttaccccagctattcaggaagctagggcagaaggattgcttgaggctaggaattcaagactggcctggatgacagagtgaaaccctcatctcttaaaaaaaaaaaaaaggaataaaaatgttctctgccttggataacatttttttttaaagattccatacaaactcattccctgaaagagaaaaacagattttctaatcaggacattgtcctgatctgcaagcgaggagtttaacaaggtaggcagagaacttccttatggaacaacagggctctgtgaccagaaaaactatgaccagcctcctctgaaaaaaggtggggggattatagggcaccagctcagccgccaagttcaggaagcagctgattcccaagactcttaggagatactgtccattcttcctcctgtccacatcactccccatttaactgcaattgctcccttgccacagggaaagcagcaagccccaggcccaggcctccatttgatttgccactccgagaactgtctgcttcattctgcttgaggagatatcttcacctaatcctagtgttaattattttaatctgagcaacgcttttatcaattagatagaaaccagcattccaaaataagtcccctaagtttgtagtttgagccaagatattttcttgagccctaagatatatgactttattagctaggatttttcttatgattaaaaacatccaaaaatgtgatatgtggtcatctctcagggaggtctaggtccttgcaggctggattttagaaatttctaagattctctacaacttttaaattttatgttatttttcaatcataatttctttcctgtggcttctatcaccattggagttagaatctgacaacctttaacttcacacttttatgagataataagttggtttcttgggcaaaggttggtttgtaagccatttacatggattgatgatttctgttcttgttttcttctaacctagaactcaggtccacagttttccacaggctaatggcactatgaaacagatataaagaaaaatagacactgttctgagtttctcttgagtgtttttgtgctatgatctgatcatctattggttacctttacacattacattcctaaatcttctatcctgcctctgggatattagaaacttgtctttacttgtgtatcacattactttgctaatgagctgggaaaattcccaaactaaagacccggatttcagtttttaaaatatttaatcacaaaatattgggactagtcacaggcacacatagcccgggaactccttaaacacctgcaacaaaaagaaaagaatagaggctacaaatgcaagcgctggaatagaaccaactgaggtccaacctgtgcaccaccagttacatgctgtgaggccctgcgttggccacttaacctaaaactcactttcttcacctttaaaatgggaacaataatagcaacaaccccgtagggtggttaggcagagtgaccaaattattgtgtatgaagagaatagcccgtgtctgtccacaataggcatctgataaatgtcaggtctcaccatcgttgtcatcattagcaccacatacaagtgcattccccaaacccaccacatctgagaaactgaatctttcagggccacatgctgagaatacactggtgggtgctccccttctgttaatgaaacacagaggacgagttgatccttaggcaagtttctaaggaaagggggatacatttaaaaagcaaaccattactatgtagctattttaaaataatgctgccactcttgcatcagaaacaagtcataattttgtttattcttcatttctcatttccatattcgtttaataacaaaatgggagaaacattagtgggagatagtaattgtaaaagtagcaataaagttaatggcaacattaaaaatactgtacacctataaacacggcaatattcaaggcaatttgaaatatcaagtaactcacaaattgatgacacatgtaagtgaaccatacatttagggtcagtggcctgttagtccattagaaaaaaggaaaaataataataattctgtttaaagaccattcctaagtggtcaataaagaatgattagttcataaaacatcaactctggacataaataaattgagaaaacctttccaggagatcgccaggggaacattcaggataccagaaggcaaaacaatgtaagactgaagccaagcactataaatccatccagaaagagggctcccatgcctcggggcactgcttccagatccccatcctctgcttctgcaggcaaaatcatgggtgtgtttaaaatcaacaataataactatagccttcatctgctgatctaaatgattctacaacacacaggaatcatagagcccagaacgttggcttaagggagagcctaggtattgattctgccagagtctatttcatatatgagggatctgacatttggaaaaactctaaaatgggttttccagaggccaagaaagtatcctgtgaacctggactgccatattaggctcctgagggtagcctcagcaaccctagcacaaccgtccaaaaaagaaggaaaaaataactgaaacacaccccaggagccttcttttgctcatgtgtccagaagactcctttgggaacctaatggaagctgtgtatcctctcccttgaaaagggtaccaaaaaatctgagtgtttacatcctccagtcccaacctgagcctgtttataacccctgcaacagtagcaggtggtatcatggaaagaccaggcataaatgagctattttcatcaaagtaattcaaagagcgagctatgacagttggatcaaactattcaggcctggaaatagaggacggaatccaggctgatttcctgccatgttggaaatactgcttgcctctgtgaccagatcagatggcttgacaatgatgggaatacagtgtggctatctgggaggtggggtggaagagaaaagggcaacttatataaatatagctcagtaaatacactggcataaggcattaggtagacctgggtacaaattctagctatgcatttaacagtgaccccagccaggttacttagcttgtaacccttgacttccttaactgtataattaggataacaagactaaccttgcatagttgtatttaggattagggattacacacatacacacacacacacacacacagagagaaagagagagagagagcgcccagcatggtgtctatcacatagctggtatgcaataaaacatgactgctattattgttgttcactcattcattgaatgtatttattaaccatttactatggtgccaagcactagggttttaataagcaagccagatgaagcagtgtccttaagttgttcacagcctaatggaagctacagataagaaaacaaaccactgcaccatggtgtaatctttgtgagggtgaggaattttcagggtactatggaagcccctaaaacaacttggggagtcagaaatggcttccagggagaactgctatttgagacaaaacctaaagaataacaagggttggctgggccataaggatggggcgaagatgtcaggtagaggtgcaggaggaggtatcttgctctagttcaagagcagatatttgagagagcttgttaaaggacaggctggagagtgaagggagagcttacaagccatttctcagagtttagccttcacaccatccctgtattggcaaacagcaatggcaagtattaaatcatggggagattaggcacagacaacacatcgataaaaccaaaccaggtttacttacctgaataaggaagaaactcaaaatacagagataactgtattatccaagaccaagatacaagcttctggccactgaattctgcatgagagggtacacagctaacagtgaaaacatgaatgagtaaaggtcacaccagaccctctggagacctgattttctcccccatttttagcctaccacagagggtctcatttaattctttcagcaacataagctccacatgtctatacccaccagtggaaggcagtcagtttgaccagccctagtgaagccttcagacgttccctgctgattctgcactgccctgagagacccaagggaccgtccgtacgatacctttcaagtttcctttaagggcatatacagctctgtaatgaacatcttcagcttcttcagaacatttctcacaggatgagccaaggaccaaaagaaatcagaccacagtctcattttctagtaagaaaatcctctgatagaatcatggccagtggttgagataaattatagaagcttgatgtatgtcatcaaagcagtctttgcttcattaaaacacaataatggtcccttaaaaataggattgtgttaataaattgatgcatgaacaatttccaggagcatatcttaaagtgaaactcacctcaaatatttgtctaaggagaagcaaactagtggctgtggtaaaactggttaaccagttctacttaaagtcctc

SEQ ID NO: 1278 - DNA, 8460 bp, Homo sapiens
gtgaatcttatccttcttgtccacagggaatttgccaaagagagagagagagtggagaaccgaagggctttcatgaagctgcggcgccagcagcagattgagcgtgagctgaatggctaccgtgcctggatagacaaagcagaggaagtcatgctcgctgaagaaaataaaaatgctggaacatccgccttagaagtgcttcgaagggcaaccatcaagaggagccggacagaggccatgactcgagactccagtgatgagcactgtgttgatatctcctctgtgggcacacctctggcccgagccagtatcaaaagtgcaaaggtagacggggtctcttatttccggcacaaggaaaggcttctgcgcatctccattcgccacatggttaaatcccaggtgttttactggattgtgctgagccttgtggcactcaacactgcctgtgtggccattgtccatcacaaccagccccagtggctcacccacctcctctactatgcagaatttctgtttctgggactcttcctcttggagatgtccctgaagatgtatggcatggggcctcgcctttattttcactcttcattcaactgctttgattttggggtcacagtgggcagtatctttgaagtggtctgggcaatcttcagacctggtacgtcttttggaatcagtgtcttgcgagccctccggcttctaagaatatttaaaataaccaagtattgggcttccctacggaatttggtggtctccttgatgagctcaatgaagtctatcatcagtttgcttttcctcctcttcctcttcatcgttgtctttgctctcctaggaatgcagttatttggaggcaggtttaactttaatgatgggactccttcggcaaattttgataccttccctgcagccatcatgactgtgttccagatcctgacgggtgaggactggaatgaggtgatgtacaatgggatccgctcccagggtggggtcagctcaggcatgtggtctgccatctacttcattgtgctcaccttgtttggcaactacacgctactgaatgtgttcttggctatcgctgtggataatctcgccaacgcccaggaactgaccaaggatgaacaggaggaagaagaggccttcaaccagaaacatgcactgcagaaggccaaggaggtcagcccgatgtctgcacccaacatgccttcgatcgagagggagcggaggcgccggcaccacatgtccgtgtgggagcagcgtaccagccagctgaggaagcacatgcagatgtccagccaggaggccctcaacagagaggaggcgccgaccatgaacccgctcaaccccctcaacccgctcagctccctcaacccgctcaatgcccaccccagcctttatcggcgacccagggccattgagggcctggccctgggcctggccctggagaagttcgaggaggagcgcatcagccgtggggggtccctcaagggggatggaggggaccgatccagtgccctggacaaccagaggacccctttgtccctgggccagcgggagccaccatggctggccaggccctgtcatggaaactgtgacccgactcagcaggaggcagggggaggagaggctgtggtgacctttgaggaccgggccaggcacaggcagagccaacggcgcagccggcatcgccgcgtcaggacagaaggcaaggagtcctcttcagcctcccggagcaggtctgccagccaggaacgcagtctggatgaagccatgcccactgaaggggagaaggaccatgagctcaggggcaaccatggtgccaaggagccaacgatccaagaagagagagcccaggatttaaggaggaccaacagtctgatggtgtccagaggctccgggctggcaggaggccttgatgaggctgacacccccctagtcctgccccatcctgagctggaagtggggaagcacgtggtgctgacggagcaggagccagaaggcagcagtgagcaggccctgctggggaatgtgcagctagacatgggccgggtcatcagccagagcgagcctgacctctcctgcatcacggccaacacggacaaggccaccaccgagagcaccagcgtcaccgtcgccatccccgacgtggaccccttggtggactcaaccgtggtgcacattagcaacaagacggatggggaagccagtcccttgaaggaggcagagatcagagaggatgaggaggaggtggagaagaagaagcagaagaaggagaagcgtgagacaggcaaagccatggtgccccacagctcaatgttcatcttcagcaccaccaacccgatccggagggcctgccactacatcgtgaacctgcgctactttgagatgtgcatcctcctggtgattgcagccagcagcatcgccctggcggcagaggaccccgtcctgaccaactcggagcgcaacaaagtcctgaggtattttgactatgtgttcacgggcgtgttcacctttgagatggttataaagatgatagaccaaggcttgatcctgcaggatgggtcctacttccgagacttgtggaacatcctggactttgtggtggtcgttggcgcattggtggcctttgctctggcaaccaacaaaggacgggacatcaagaccatcaagtctctgcgggtgctccgagttctaaggccactgaaaaccatcaagcgcttgcccaagctcaaggccgtcttcgactgcgtagtgacctccttgaagaatgtcttcaacatactcattgtgtacaagctcttcatgttcatctttgctgtcatcgcagttcagctcttcaagggaaagttcttttattgcacggacagttccaaggacacagagaaggagtgcataggcaactatgtagatcatgagaaaaacaagatggaggtgaagggccgggaatggaagcgccatgaattccactacgacaacattatctgggccctgctgaccctcttcaccgtctccacaggggaaggatggcctcaagttctgcagcactctgtagatgtgacagaggaagaccgaggcccaagccgcagcaaccgcatggagatgtctatcttttatgtagtctactttgtggtcttccccttcttctttgtcaatatctttgtggctctcatcatcatcaccttccaggagcaaggggataagatgatggaggagtgcagcctggagaagaatgagagggcgtgcatcgacttcgccatcagcgccaaacctctcacccgctacatgccgcagaacagacacaccttccagtaccgcgtgtggcactttgtggtgtctccgtcctttgagtacaccattatggccatgatcgccttgaatactgttgtgctgatgatgaagtattattctgctccctgtacctatgagctggccctgaagtacctgaatatcgccttcaccatggtgttttccctggaatgtgtcctgaaggtcatcgcttttggctttttgaactatttccgagacacctggaatatctttgacttcatcaccgtgattggcagtatcacagaaattatcctgacagacagcaagctggtgaacaccagtggcttcaatatgagctttctgaagctcttccgagctgcccgcctcataaagctcctgcgtcagggctataccatacgcattttgctgtggacctttgtgcagtcctttaaggccctcccttatgtctgccttttaattgccatgcttttcttcatttatgccatcattgggatgcaggtatttggaaacataaaattagacgaggagagtcacatcaaccggcacaacaacttccggagtttctttgggtccctaatgctactcttcaggagtgccacaggtgaggcctggcaggagattatgctgtcatgccttggggagaagggctgtgagcctgacaccaccgcaccatcagggcagaacgagaacgaacgctgcggcaccgatctggcctacgtgtactttgtctccttcatcttcttctgctccttcttgatgctcaacctgtttgtggccgtcatcatggacaactttgagtacctgactcgggactcctccatcctggggcctcaccacttggacgagtttgtccgcgtctgggcagaatatgaccgagcagcatgtggccgcatccattacactgagatgtatgaaatgctgactctcatgtcacctccgctaggcctcggcaagagatgtccctccaaagtggcatataagaggttggtcctgatgaacatgccagtagctgaggacatgacggtccacttcacctccacacttatggctctgatccggacagctctggacattaaaattgccaaaggtggtgcagacaggcagcagctagactcagagctacaaaaggagaccctagccatctggcctcacctatcccagaagatgctggatctgcttgtgcccatgcccaaagcctctgacctgactgtgggcaaaatctatgcagcaatgatgatcatggactactataagcagagtaaggtgaagaagcagaggcagcagctggaggaacagaaaaatgcccccatgttccagcgcatggagccttcatctctgcctcaggagatcattgctaatgccaaagccctgccttacctccagcaggaccccgtttcaggcctgagtggccggagtggatacccttcgatgagtccactctctccccaggatatattccagttggcttgtatggaccccgccgatgacggacagttccaagaacggcagtctctggtggtgacagaccctagctccatgagacgttcattttccactattcgggataagcgttcaaattcctcgtggttggaggaattctccatggagcgaagcagtgaaaatacctacaagtcccgtcgccggagttaccactcctccttgcggctgtcagcccaccgcctgaactctgattcaggccacaagtctgacactcaccgctcagggggcagggagcggggacgatcaaaagagcgaaagcatcttctctctcctgatgtctcccgctgcaattcagaagagcgagggacccaggctgactgggagtccccagagcgccgtcaatccaggtcacccagtgagggcaggtcacagacgcccaacagacagggcacaggttccctaagtgagagctccatcccctctgtctctgacaccagcaccccaagaagaagtcgtcggcagctcccacccgtcccgccaaagccccggcccctcctttcctacagctccctgattcgacacgcgggcagcatctctccacctgctgatggaagcgaggagggctccccgctgacctcccaagctctggagagcaacaatgcttgcctgaccgagtcttccaactctccgcacccccagcagagccaacatgcctccccacagcgctacatctccgagccctacttggccctgcacgaagactcccacgcctcagactgtggtgaggaggagacgctcactttcgaagcagccgtggctactagcctgggccgttccaacaccatcggctcagccccacccctgcggcatagctggcagatgcccaacgggcactatcggcggcggaggcgcggggggcctgggccaggcatgatgtgtggggctgtcaacaacctgctaagtgacacggaagaagatgacaaatgctagaggctgctcccccctccgatgcatgctcttctctcacatggagaaaaccaagacagaattgggaagccagtgcggcccgggggggaggaagagggaaaaggaagatggaaggacaccatgcattatcagagaagaggaagtaaaggacaatcagaacaccagtcaaacccaccaaattgctttattcccctttgcaagatgggcactgccatagttctgcctctttgctggggaaagaaaccaggaacgtggagggttattactgcgggagaagggacacgaggatggctttgcttccccttgccccttcccacttttctaaaagctgtggagggatctagctggcctatgtctacactcagtgccctgagaagcctggaagactttctggctcttaactggggagtagtggagaccataggagaggactctcctccctcaccagctcttacgcctcagccagcaccactgccaccagggcaactgcagcagcatctcatgcataaccctgtggcttgcttcccccagggcagcacaggctaagtcaggaacatcggatgccagggagggaggagaaagccgaagcgaaaggggtcagggtgctgaggcaacagcagcaagggctggtctggacaagaaaagccatagcccggcagcccctaccatgagggagacagagaaacagaactggtggtgctggggggtatagccccccatccttgaggcctgtcacccacacagtaggtgctgagagttaggacaggtcaggaagtcccccagggtccacaaaggtgcctgaggctctggtaagggtgaagataaaagtatttaacaaccgctatggcatcaatgtaagtggagtttggtcctagtgccggagcccatgctattccaggcattggctctttagatgccagtcatgggggaaccctgagggtgtgggtagagtagcaggggccacctaagagattaaaaacagagtctgttttccaaccagtgtggaagcaattaaatatacgtaacagtgctacggccacaccagcacctcctggctgaaggtcagcccacactctggtccatgaggcagcaaggccagtgctgtgccaagcccggtaaggccaagtgccgaggcccagccttccctgccactcctctgagagggcagaacacacatatccaagtaggctacccaccactgggtagggatttctgtaaagatgggaaaggctgatagattgaaataagcttctgtgaaagtctggatttactgaggacctcccctgaggagggaccgttgggaccgcagattctgcagctggtgtggggttcaggtcagtttgtcaggatgctttaaggtgattagtaaatatacctcagcttagacttgggctgctccttctagcaaagcaggctccagtggggcctcatcatacaggatgacaagactggggccctgttcaccttgaacatgcccctgggccaagatggggcttcacccctccccagagtaagagctggggctgacagtcccaccctgtcattcctaatagcccaaacgcagaagcactgagcaagagagccctttcttgccaagccagtgctcttttggtatatggcatacagctccattggaggggacacatcactggctttatctggtggaaatgtacctttcccttaagttcctccttagtgccatcacagcaggtgaatgggtgccctacggggccctccttcccccaccaggaacagatggaacctgccacccaggatcctgatctgccctgcactgagcactcagtggataaacactcctccagcccagacacactcctcctcttgggcaggagcaatccagagttgttatttttcttagaaggagcctcttttccctctattttttaaattgaaatataatagctgcatcagccctgaaaagccaaattcaaccacatggctggagaatcatttgtcatggccccgccttctcttctgatactaatggagcttcatgacccacggtcagcccccaaaccaaagttgtcccaacagaggaggccagtgaggcagagacagagctctcccactctcagaccctcttttgtcttcattttcctctcccacttagcacatgtgtgcttgagggtggctgggaatgtgatatacagcaccctgatcctaacaggtgtgattgttacgtaagacgctgatactgggccttgtattgcttttaaagtttcctctgctcagcatcatttcatgccaaagtgctgctatgggctgctttgtgtgcacaaaattgctttttccacctcggaaatgcagctttccctagggggaggcctacaacaggacgaccattctgagccagtgagtctattgcatggtgttttgagaaagggaattttagtgacaccttatgccatttcaagaggagaaatgcaggctggcagagcaatttccagaaatggaatttgcctgcaaatagtataaacaacactaaatttactgtgccaggaaatcttcctgaactccttgaactcatacacacaggtatttgagtcctgaataaagtgttggaaagcactgcagatgcggtcacctgactgaccacctgggttttctattaccagtgaatttcttttattcaccttcccttgaccaagaaattgggtttcttttccctcagcctgcacttactcttctattaagaccagaaaataaaataattttccgttgagtcac

SEQ ID NO: 1279 - protein, 1862 aa, Homo sapiens
MKLRRQQQIERELNGYRAWIDKAEEVMLAEENKNAGTSALEVLRRATIKRSRTEAMTRDSSDEHCVDISSVGTPLARASIKSAKVDGVSYFRHKERLLRISIRHMVKSQVFYWIVLSLVNTACVAIVHHNQPQWLTHLLYYAEFLFLGLFLLEMSLKMYGMGPRLYFHSSFNCFDFGVTVGSIFEVVWAIFRPGTSFGISVLRALRLLRIFKITKYWASLRNLVVSLMSSMKSIISLLFLLFLFIVVFALLGMQLFGGRFNFNDGTPSANFDTFPAAIMTVFQILTGEDWNEVMYNGIRSQGGVSSGMWSAIYFIVLTLFGNYTLLNVFLAIAVDNLANAQELTKDEQEEEEAFNQKHALQKAKEVSPMSAPNMPSIERERRRRHHMSVWEQRTSQLRKHMQMSSQEALNREEAPTMNPLNPLNPLSSLNPLNAHPSLYRRPRAIEGLALGLALEKFEEERISRGGSLKGDGGDRSSALDNQRTPLSLGQREPPWLARPCHGNCDPTQQEAGGGEAVVTFEDRARHRQSQRRSRHRRVRTEGKESSSASRSRSASQERSLDEAMPTEGEKDHELRGNHGAKEPTIQEERAQDLRRTNSLMVSRGSGLAGGLDEADTPLVLPHPELEVGKHVVLTEQEPEGSSEQALLGNVQLDMGRVISQSEPDLSCITANTDKATTESTSVTVAIPDVDPLVDSTVVHNKTDGEDLKEAEIREDEEEVEKKKQKKEKRETGKAMVPHSSMFIFSTTNPIRRACHYIVNLRYFEMCILLVIAASSIAAEDPVLTNSNKVLRYFDYVFTGVFTFEMVIKMIDQGLILQDGSYFRDLWNILDFVVVVGALVAFATNKGRDIKTIKSLRVLRVLRPLKTIKRLPKLKAVFDCVVTSLKNVFNILIVYKLFMFIFAVIAVQLFKGKFFYCTDSSKDTEKECIGNYVDHEKNKMEVKGREWKRHEFHYDNIIWALLTLFTVSTGEGWPQVLQHSVDVTEEDRGPSRSNRMEMSIFYVVYFVVFPFFFVNIFVIIITFQEQGDKMMEECSLEKNERACIDFAISAKPLTRYMPQNRHTFQYRVWHFVVSPSFEYTIMAMIALNTVVLMMKYYSAPCTYELALKYLNIAFTMVFSLECVLKVIAFGFLNYFRDTWNIFDFITVIGSITEIILTDSKLVNTSGFNMSFLKLFRAARLIKLLRQGYTIRILLWTFVQSFKALPYVCLLIAMLFFIYAIIGMQVFGNIKLDEESHINRHNNFRSFFGSLMLLFRSATGEAWQEIMLSCLGEKGCEPDTTAPSGQNENERCGTDLAYVYFVSFIFFCSFLMLNLFVAVIMDNFEYLTRDSSILGPHHLDEFVRVWAEYDRAACGRIHYTEMYEMLTLMSPPLGLGKRCPSKVAYKRLVLMNMPVAEDMTVHFTSTLMALIRTALDIKIAKGGADRQQLDSELQKETLAIWPHLSQKMLDLLVPMPKASDLTVGKIYAAMMIMDYYKQSKVKKQRQQLEEQKNAPMFQRMEPSSLPQEIIANAKALPYLQQDPVSGLSGRSGYPSMSPLSPQDIFQLACMDPADDGQFQERQSLVVTDPSSMRRSFSTIRDKRSNSSWLEEFSMERSSENTYKSRRRSYHSSLRLSAHRLNSDSGHKSDTSGGRERGRSKERKHLLSPDVSRCNSEERGTQADWESPERRQSRSPSEGRSQTPNRQGTGSLSESSIPSVSDTSTPRRSRRQLPPVPPKPRPLLSYSSLIRHAGSISPPADGSEEGSPLTSQALESNNACLTESSNSPHPQQSQHDQRYISEPYLALHEDSHASDCGEEETLTFEAAVATSLGRSNTIGSAPPLRHSWQMPNGHYRRRRRGGPGPGMMCGAVNNLLSDTEEDDKC

SEQ ID NO: 1280 - DNA, 10103 bp, Homo sapiens
gatgcgtggactgagcccagaccgcaggctgcccgagcccgccccctgcccggctgcggggagccctgagcccaggtccgcgggccgccgccaacgccacgtcctggccctgccggaagaagaggcatggcggccccagcagtgcgctctgctcgaggccgacgcctcggacgaggtgggcatgctgccggcttccccgcgcgccgcctctggcttcgacaacttcttccaggtgcaggagggcgagggccagggctgggagggcgccatggcactggaggcgggctccagccctttcctgccggtgagccccgaggtcatgaagcggcggcgcgggggcctcatcgagcagcgcgacatcatcaaggcccacgaggcgcacaagatgcagagcaccccgcaggcccggcgcaaggaatgggagatggctcgcttcggggaggcggtggtcgccaggccagggtccggcgatggagactcggaccagagcaggaaccggcaaggaacccccgtgccggcctcggggcaggcggccgcctacaagcagacgaaagcacagagggcgcggactatggctttgtacaaccccattcccgtccggcagaactgtttcaccgtcaacagatccctgttcatcttcggagaagataacattgtcaggaaatatgccaagaagctcatcgattggccgccatttgagtacatgatcctggccaccatcattgccaactgcatcgtcctggccctggagcagcatcttcctgaggatgacaagacccccatgtcccgaagactggagaagacagaaccttatttcattgggatcttttgctttgaagctgggatcaaaattgtggccctggggttcatcttccataagggctcttacctccgcaatggctggaatgtcatggacttcatcgtggtcctcagtggcatcctggccactgcaggaacccacttcaatactcacgtggacctgaggaccctccgggctgtgcgtgtcctgcggcctttgaagctcgtgtcagggatacctagcctgcagattgtgttgaagtccatcatgaaggccatggtacctcttctgcagattggccttctgctcttctttgccatcctgatgtttgctatcattggtttggagttctacagtggcaagttacatcgagcatgcttcatgaacaattcaggtattctagaaggatttgacccccctcacccatgtggtgtgcagggctgcccagctggttatgaatgcaaggactggatcggccccaatgatgggatcacccagtttgataacatcctttttgctgtgctgactgtcttccagtgcatcaccatggaagggtggaccactgtgctgtacaataccaatgatgccttaggagccacctggaattggctgtacttcatccccctcatcatcattggatccttctttgttctcaacctagtcctgggagtgctttccggggaatttgccaaagagagagagagagtggagaaccgaagggctttcatgaagctgcggcgccagcagcagattgagcgtgagctgaatggctaccgtgcctggatagacaaagcagaggaagtcatgctcgctgaagaaaataaaaatgctggaacatccgccttagaagtgcttcgaagggcaaccatcaagaggagccggacagaggccatgactcgagactccagtgatgagcactgtgttgatatctcctctgtgggcacacctctggcccgagccagtatcaaaagtgcaaaggtagacggggtctcttatttccggcacaaggaaaggcttctgcgcatctccattcgccacatggttaaatcccaggtgttttactggattgtgctgagccttgtggcactcaacactgcctgtgtggccattgtccatcacaaccagccccagtggctcacccacctcctctactatgcagaatttctgtttctgggactcttcctcttggagatgtccctgaagatgtatggcatggggcctcgcctttattttcactcttcattcaactgctttgattttggggtcacagtgggcagtatctttgaagtggtctgggcaatcttcagacctggtacgtcttttggaatcagtgtcttgcgagccctccggcttctaagaatatttaaaataaccaagtattgggcttccctacggaatttggtggtctccttgatgagctcaatgaagtctatcatcagtttgcttttcctcctcttcctcttcatcgttgtctttgctctcctaggaatgcagttatttggaggcaggtttaactttaatgatgggactccttcggcaaattttgataccttccctgcagccatcatgactgtgttccagatcctgacgggtgaggactggaatgaggtgatgtacaatgggatccgctcccagggtggggtcagctcaggcatgtggtctgccatctacttcattgtgctcaccttgtttggcaactacacgctactgaatgtgttcttggctatcgctgtggataatctcgccaacgcccaggaactgaccaaggatgaacaggaggaagaagaggccttcaaccagaaacatgcactgcagaaggccaaggaggtcagcccgatgtctgcacccaacatgccttcgatcgaaagagacagaaggagaagacaccacatgtcgatgtgggagccacgcagcagccacctgagggagcggaggcgccggcaccacatgtccgtgtgggagcagcgtaccagccagctgaggaagcacatgcagatgtccagccaggaggccctcaacagagaggaggcgccgaccatgaacccgctcaaccccctcaacccgctcagctccctcaacccgctcaatgcccaccccagcctttatcggcgacccagggccattgagggcctggccctgggcctggccctggagaagttcgaggaggagcgcatcagccgtggggggtccctcaagggggatggaggggaccgatccagtgccctggacaaccagaggacccctttgtccctgggccagcgggagccaccatggctggccaggccctgtcatggaaactgtgacccgactcagcaggaggcagggggaggagaggctgtggtgacctttgaggaccgggccaggcacaggcagagccaacggcgcagccggcatcgccgcgtcaggacagaaggcaaggagtcctcttcagcctcccggagcaggtctgccagccaggaacgcagtctggatgaagccatgcccactgaaggggagaaggaccatgagctcaggggcaaccatggtgccaaggagccaacgatccaagaagagagagcccaggatttaaggaggaccaacagtctgatggtgtccagaggctccgggctggcaggaggccttgatgaggctgacacccccctagtcctgccccatcctgagctggaagtggggaagcacgtggtgctgacggagcaggagccagaaggcagcagtgagcaggccctgctggggaatgtgcagctagacatgggccgggtcatcagccagagcgagcctgacctctcctgcatcacggccaacacggacaaggccaccaccgagagcaccagcgtcaccgtcgccatccccgacgtggaccccttggtggactcaaccgtggtgcacattagcaacaagacggatggggaagccagtcccttgaaggaggcagagatcagagaggatgaggaggaggtggagaagaagaagcagaagaaggagaagcgtgagacaggcaaagccatggtgccccacagctcaatgttcatcttcagcaccaccaacccgatccggagggcctgccactacatcgtgaacctgcgctactttgagatgtgcatcctcctggtgattgcagccagcagcatcgccctggcggcagaggaccccgtcctgaccaactcggagcgcaacaaagtcctgaggtattttgactatgtgttcacgggcgtgttcacctttgagatggttataaagatgatagaccaaggcttgatcctgcaggatgggtcctacttccgagacttgtggaacatcctggactttgtggtggtcgttggcgcattggtggcctttgctctggcgtaaaaccaacaaaggacgggacatcaagaccatcaagtctctgcgggtgctccgagttctaaggccactgaaaaccatcaagcgcttgcccaagctcaaggccgtcttcgactgcgtagtgacctccttgaagaatgtcttcaacatactcattgtgtacaagctcttcatgttcatctttgctgtcatcgcagttcagctcttcaagggaaagttcttttattgcacggacagttccaaggacacagagaaggagtgcataggcaactatgtagatcatgagaaaaacaagatggaggtgaagggccgggaatggaagcgccatgaattccactacgacaacattatctgggccctgctgaccctcttcaccgtctccacaggggaaggatggcctcaagttctgcagcactctgtagatgtgacagaggaagaccgaggcccaagccgcagcaaccgcatggagatgtctatcttttatgtagtctactttgtggtcttccccttcttctttgtcaatatctttgtggctctcatcatcatcaccttccaggagcaaggggataagatgatggaggagtgcagcctggagaagaatgagagggcgtgcatcgacttcgccatcagcgccaaacctctcacccgctacatgccgcagaacagacacaccttccagtaccgcgtgtggcactttgtggtgtctccgtcctttgagtacaccattatggccatgatcgccttgaatactgttgtgctgatgatgaagtattattctgctccctgtacctatgagctggccctgaagtacctgaatatcgccttcaccatggtgttttccctggaatgtgtcctgaaggtcatcgcttttggctttttgaactatttccgagacacctggaatatctttgacttcatcaccgtgattggcagtatcacagaaattatcctgacagacagcaagctggtgaacaccagtggcttcaatatgagctttctgaagctcttccgagctgcccgcctcataaagctcctgcgtcagggctataccatacgcattttgctgtggacctttgtgcagtcctttaaggccctcccttatgtctgccttttaattgccatgcttttcttcatttatgccatcattgggatgcaggtatttggaaacataaaattagacgaggagagtcacatcaaccggcacaacaacttccggagtttctttgggtccctaatgctactcttcaggagtgccacaggtgaggcctggcaggagattatgctgtcatgccttggggagaagggctgtgagcctgacaccaccgcaccatcagggcagaacgagaacgaacgctgcggcaccgatctggcctacgtgtactttgtctccttcatcttcttctgctccttcttgatgctcaacctgtttgtggccgtcatcatggacaactttgagtacctgactcgggactcctccatcctggggcctcaccacttggacgagtttgtccgcgtctgggcagaatatgaccgagcagcatgtggccgcatccattacactgagatgtatgaaatgctgactctcatgtcacctccgctaggcctcggcaagagatgtccctccaaagtggcatataagaggttggtcctgatgaacatgccagtagctgaggacatgacggtccacttcacctccacacttatggctctgatccggacagctctggacattaaaattgccaaaggtggtgcagacaggcagcagctagactcagagctacaaaaggagaccctagccatctggcctcacctatcccagaagatgctggatctgcttgtgcccatgcccaaagcctctgacctgactgtgggcaaaatctatgcagcaatgatgatcatggactactataagcagagtaaggtgaagaagcagaggcagcagctggaggaacagaaaaatgcccccatgttccagcgcatggagccttcatctctgcctcaggagatcattgctaatgccaaagccctgccttacctccagcaggaccccgtttcaggcctgagtggccggagtggatacccttcgatgagtccactctctccccaggatatattccagttggcttgtatggaccccgccgatgacggacagttccaagaacggcagtctctggagccagaggttagtgaattaaaaagcgtgcagccctctaaccatggcatctaccttccttcggacacccaggagcatgcgggatctgggagggcatcttctatgccacgtctgactgtggatccccaggtggtgacagaccctagctccatgagacgttcattttccactattcgggataagcgttcaaattcctcgtggttggaggaattctccatggagcgaagcagtgaaaatacctacaagtcccgtcgccggagttaccactcctccttgcggctgtcagcccaccgcctgaactctgattcaggccacaagtctgacactcaccgctcagggggcagggagcggggacgatcaaaagagcgaaagcatcttctctctcctgatgtctcccgctgcaattcagaagagcgagggacccaggctgactgggagtccccagagcgccgtcaatccaggtcacccagtgagggcaggtcacagacgcccaacagacagggcacaggttccctaagtgagagctccatcccctctgtctctgacaccagcaccccaagaagaagtcgtcggcagctcccacccgtcccgccaaagccccggcccctcctttcctacagctccctgattcgacacgcgggcagcatctctccacctgctgatggaagcgaggagggctccccgctgacctcccaagctctggagagcaacaatgcttgcctgaccgagtcttccaactctccgcacccccagcagagccaacatgcctccccacagcgctacatctccgagccctacttggccctgcacgaagactcccacgcctcagactgtggtgaggaggagacgctcactttcgaagcagccgtggctactagcctgggccgttccaacaccatcggctcagccccacccctgcggcatagctggcagatgcccaacgggcactatcggcggcggaggcgcggggggcctgggccaggcatgatgtgtggggctgtcaacaacctgctaagtgacacggaagaagatgacaaatgctagaggctgctcccccctccgatgcatgctcttctctcacatggagaaaaccaagacagaattgggaagccagtgcggcccgggggggaggaagagggaaaaggaagatggaaggacaccatgcattatcagagaagaggaagtaaaggacaatcagaacaccagtcaaacccaccaaattgctttattcccctttgcaagatgggcactgccatagttctgcctctttgctggggaaagaaaccaggaacgtggagggttattactgcgggagaagggacacgaggatggctttgcttccccttgccccttcccacttttctaaaagctgtggagggatctagctggcctatgtctacactcagtgccctgagaagcctggaagactttctggctcttaactggggagtagtggagaccataggagaggactctcctccctcaccagctcttacgcctcagccagcaccactgccaccagggcaactgcagcagcatctcatgcataaccctgtggcttgcttcccccagggcagcacaggctaagtcaggaacatcggatgccagggagggaggagaaagccgaagcgaaaggggtcagggtgctgaggcaacagcagcaagggctggtctggacaagaaaagccatagcccggcagcccctaccatgagggagacagagaaacagaactggtggtgctggggggtatagccccccatccttgaggcctgtcacccacacagtaggtgctgagagttaggacaggtcaggaagtcccccagggtccacaaaggtgcctgaggctctggtaagggtgaagataaaagtatttaacaaccgctatggcatcaatgtaagtggagtttggtcctagtgccggagcccatgctattccaggcattggctctttagatgccagtcatgggggaaccctgagggtgtgggtagagtagcaggggccacctaagagattaaaaacagagtctgttttccaaccagtgtggaagcaattaaatatacgtaacagtgctacggccacaccagcacctcctggctgaaggtcagcccacactctggtccatgaggcagcaaggccagtgctgtgccaagcccggtaaggccaagtgccgaggcccagccttccctgccactcctctgagagggcagaacacacatatccaagtaggctacccaccactgggtagggatttctgtaaagatgggaaaggctgatagattgaaataagcttctgtgaaagtctggatttactgaggacctcccctgaggagggaccgttgggaccgcagattctgcagctggtgtggggttcaggtcagtttgtcaggatgctttaaggtgattagtaaatatacctcagcttagacttgggctgctccttctagcaaagcaggctccagtggggcctcatcatacaggatgacaagactggggccctgttcaccttgaacatgcccctgggccaagatggggcttcacccctccccagagtaagagctggggctgacagtcccaccctgtcattcctaatagcccaaacgcagaagcactgagcaagagagccctttcttgccaagccagtgctcttttggtatatggcatacagctccattggaggggacacatcactggctttatctggtggaaatgtacctttcccttaagttcctccttagtgccatcacagcaggtgaatgggtgccctacggggccctccttcccccaccaggaacagatggaacctgccacccaggatcctgatctgccctgcactgagcactcagtggataaacactcctccagcccagacacactcctcctcttgggcaggagcaatccagagttgttatttttcttagaaggagcctcttttccctctattttttaaattgaaatataatagctgcatcagccctgaaaagccaaattcaaccacatggctggagaatcatttgtcatggccccgccttctcttctgatactaatggagcttcatgacccacggtcagcccccaaaccaaagttgtcccaacagaggaggccagtgaggcagagacagagctctcccactctcagaccctcttttgtcttcattttcctctcccacttagcacatgtgtgcttgagggtggctgggaatgtgatatacagcaccctgatcctaacaggtgtgattgttacgtaagacgctgatactgggccttgtattgcttttaaagtttcctctgctcagcatcatttcatgccaaagtgctgctatgggctgctttgtgtgcacaaaattgctttttccacctcggaaatgcagctttccctagggggaggcctacaacaggacgaccattctgagccagtgagtctattgcatggtgttttgagaaagggaattttagtgacaccttatgccatttcaagaggagaaatgcaggctggcagagcaatttccagaaatggaatttgcctgcaaatagtataaacaacactaaatttactgtgccaggaaatcttcctgaactccttgaactcatacacacaggtatttgagtcctgaataaagtgttggaaagcactgcagatgcggtcacctgactgaccacctgggttttctattaccagtgaatttcttttattcaccttcccttgaccaagaaattgggtttcttttccctcagcctgcacttactcttctattaagaccagaaaataaaataattttccgttgagtcac

SEQ ID NO: 1281 - protein, 1363 aa, Homo sapiens
MRGLSPDRRLPEPAPCPAAGSPEPRSAGRRQRHVLALPEEEAWRPQQCALLEADASDEVGMLPDRAASGFDNFFQVQEGEGQGWEGAMALEAGSSPFLPVSPEVMKRRRGGLIEQRDIIKAHEAHKMQSTPQARRKEWEMARFGEAVVARPGSGDGDSDQSRNRQGTPVPASGQAAAYKQTKAQRARTMALYNPIPVRQNCFTVNRSLFIFGEDNIVRKYAKKLIDWPPFEYMILATIIANCIVLALEQHLPEDDKTPMSRRLEKTEPYFIGIFCFEAGIKIVGFIFHKGSYLRNGWNVMDFIVVLSGILATAGTHFNTHVDLRTLRAVRVLRPLKLVSGIPSLQIVLKSIMKAMVPLLQIGLLLFFAILMFAIIGLEFYSGKLHRACFMNNSGIGFDPPHPCGVQGCPAGYECKDWIGPNDGITQFDNILFAVLTVFQCITMEGWTTVLYNTNDALGATWNWLYFIPLIIIGSFFVLNLVLGVLSGEFAKERERVENRRAFMKLRRQQQIERELNGYRAWIDKAEEVMLAEENKNAGTSALEVLRRATIKRSRTEAMTRDSSDEHCVDISSVGTPLARASIKSAKVDGVSYFRHKERLLRISIRHMVKSQVFYWIVLSLVNTACVAIVHHNQPQWLTHLLYYAEFLFLGLFLLEMSLKMYGMGPRLYFHSSFNCFDFGVTVGSIFEVVWAIFRPGTSFGISVLRALRLLRIFKITKYWASLRNLVVSLMSSMKSIISLLFLLFLFIVVFALLGMQLFGGRFNFNDGTPSANFDTFPAAIMTVFQILTGEDWNEVMYNGIRSQGGVSSGMWSAIYFIVLTLFGNYTLLNVFLAIAVDNLANAQELTKDEQEEEEAFNQKHALQKAKEVSPMSAPNMPSIERDRRRRHHMSMWEPRSSHLRERRRRHHMSVWEQRTSQLRKHMQMSSQEALNREEAPTMNPLNPLNPLSSLNPLNAHPSLYRRPRAIEGLALGLALEKFEEERISRGGSLKGDGGDRSSALDNQRTPLSLGQREPPWLARPCHGNCDPTQQEAGGGEAVVTFEDRARHRQSQRRSRHRRVRTEGKESSSASRSRSASQERSLDEAMPTEGEKDHELRGNHGAKEPTIQEERAQDLRRTNSLMVSRGSGLAGGLDEADTPLVLPHPELEVGKHVVLTEQEPEGSSEQALLGNVQLDMGRVISQSEPDLSCITANTDKATTESTSVTVAIPDVDPLVDSTVVHNKTDGEDLKEAEIREDEEEVEKKKQKKEKRETGKAMVPHSSMFIFSTTNPIRRACHYIVNLRYFEMCILLVIAASSIAAEDPVLTNSNKVLRYFDYVFTGVFTFEMVIKMIDQGLILQDGSYFRDLWNILDFVVVVGALVAFA

SEQ ID NO: 1282 - DNA, 8646 bp, Homo sapiens
gtgaatcttatccttcttgtccacagggaatttgccaaagagagagagagagtggagaaccgaagggctttcatgaagctgcggcgccagcagcagattgagcgtgagctgaatggctaccgtgcctggatagacaaagcagaggaagtcatgctcgctgaagaaaataaaaatgctggaacatccgccttagaagtgcttcgaagggcaaccatcaagaggagccggacagaggccatgactcgagactccagtgatgagcactgtgttgatatctcctctgtgggcacacctctggcccgagccagtatcaaaagtgcaaaggtagacggggtctcttatttccggcacaaggaaaggcttctgcgcatctccattcgccacatggttaaatcccaggtgttttactggattgtgctgagccttgtggcactcaacactgcctgtgtggccattgtccatcacaaccagccccagtggctcacccacctcctctactatgcagaatttctgtttctgggactcttcctcttggagatgtccctgaagatgtatggcatggggcctcgcctttattttcactcttcattcaactgctttgattttggggtcacagtgggcagtatctttgaagtggtctgggcaatcttcagacctggtacgtcttttggaatcagtgtcttgcgagccctccggcttctaagaatatttaaaataaccaagtattgggcttccctacggaatttggtggtctccttgatgagctcaatgaagtctatcatcagtttgcttttcctcctcttcctcttcatcgttgtctttgctctcctaggaatgcagttatttggaggcaggtttaactttaatgatgggactccttcggcaaattttgataccttccctgcagccatcatgactgtgttccagatcctgacgggtgaggactggaatgaggtgatgtacaatgggatccgctcccagggtggggtcagctcaggcatgtggtctgccatctacttcattgtgctcaccttgtttggcaactacacgctactgaatgtgttcttggctatcgctgtggataatctcgccaacgcccaggaactgaccaaggatgaacaggaggaagaagaggccttcaaccagaaacatgcactgcagaaggccaaggaggtcagcccgatgtctgcacccaacatgccttcgatcgaaagagacagaaggagaagacaccacatgtcgatgtgggagccacgcagcagccacctgagggagcggaggcgccggcaccacatgtccgtgtgggagcagcgtaccagccagctgaggaagcacatgcagatgtccagccaggaggccctcaacagagaggaggcgccgaccatgaacccgctcaaccccctcaacccgctcagctccctcaacccgctcaatgcccaccccagcctttatcggcgacccagggccattgagggcctggccctgggcctggccctggagaagttcgaggaggagcgcatcagccgtggggggtccctcaagggggatggaggggaccgatccagtgccctggacaaccagaggacccctttgtccctgggccagcgggagccaccatggctggccaggccctgtcatggaaactgtgacccgactcagcaggaggcagggggaggagaggctgtggtgacctttgaggaccgggccaggcacaggcagagccaacggcgcagccggcatcgccgcgtcaggacagaaggcaaggagtcctcttcagcctcccggagcaggtctgccagccaggaacgcagtctggatgaagccatgcccactgaaggggagaaggaccatgagctcaggggcaaccatggtgccaaggagccaacgatccaagaagagagagcccaggatttaaggaggaccaacagtctgatggtgtccagaggctccgggctggcaggaggccttgatgaggctgacacccccctagtcctgccccatcctgagctggaagtggggaagcacgtggtgctgacggagcaggagccagaaggcagcagtgagcaggccctgctggggaatgtgcagctagacatgggccgggtcatcagccagagcgagcctgacctctcctgcatcacggccaacacggacaaggccaccaccgagagcaccagcgtcaccgtcgccatccccgacgtggaccccttggtggactcaaccgtggtgcacattagcaacaagacggatggggaagccagtcccttgaaggaggcagagatcagagaggatgaggaggaggtggagaagaagaagcagaagaaggagaagcgtgagacaggcaaagccatggtgccccacagctcaatgttcatcttcagcaccaccaacccgatccggagggcctgccactacatcgtgaacctgcgctactttgagatgtgcatcctcctggtgattgcagccagcagcatcgccctggcggcagaggaccccgtcctgaccaactcggagcgcaacaaagtcctgaggtattttgactatgtgttcacgggcgtgttcacctttgagatggttataaagatgatagaccaaggcttgatcctgcaggatgggtcctacttccgagacttgtggaacatcctggactttgtggtggtcgttggcgcattggtggcctttgctctggcaaccaacaaaggacgggacatcaagaccatcaagtctctgcgggtgctccgagttctaaggccactgaaaaccatcaagcgcttgcccaagctcaaggccgtcttcgactgcgtagtgacctccttgaagaatgtcttcaacatactcattgtgtacaagctcttcatgttcatctttgctgtcatcgcagttcagctcttcaagggaaagttcttttattgcacggacagttccaaggacacagagaaggagtgcataggcaactatgtagatcatgagaaaaacaagatggaggtgaagggccgggaatggaagcgccatgaattccactacgacaacattatctgggccctgctgaccctcttcaccgtctccacaggggaaggatggcctcaagttctgcagcactctgtagatgtgacagaggaagaccgaggcccaagccgcagcaaccgcatggagatgtctatcttttatgtagtctactttgtggtcttccccttcttctttgtcaatatctttgtggctctcatcatcatcaccttccaggagcaaggggataagatgatggaggagtgcagcctggagaagaatgagagggcgtgcatcgacttcgccatcagcgccaaacctctcacccgctacatgccgcagaacagacacaccttccagtaccgcgtgtggcactttgtggtgtctccgtcctttgagtacaccattatggccatgatcgccttgaatactgttgtgctgatgatgaagtattattctgctccctgtacctatgagctggccctgaagtacctgaatatcgccttcaccatggtgttttccctggaatgtgtcctgaaggtcatcgcttttggctttttgaactatttccgagacacctggaatatctttgacttcatcaccgtgattggcagtatcacagaaattatcctgacagacagcaagctggtgaacaccagtggcttcaatatgagctttctgaagctcttccgagctgcccgcctcataaagctcctgcgtcagggctataccatacgcattttgctgtggacctttgtgcagtcctttaaggccctcccttatgtctgccttttaattgccatgcttttcttcatttatgccatcattgggatgcaggtatttggaaacataaaattagacgaggagagtcacatcaaccggcacaacaacttccggagtttctttgggtccctaatgctactcttcaggagtgccacaggtgaggcctggcaggagattatgctgtcatgccttggggagaagggctgtgagcctgacaccaccgcaccatcagggcagaacgagaacgaacgctgcggcaccgatctggcctacgtgtactttgtctccttcatcttcttctgctccttcttgatgctcaacctgtttgtggccgtcatcatggacaactttgagtacctgactcgggactcctccatcctggggcctcaccacttggacgagtttgtccgcgtctgggcagaatatgaccgagcagcatgtggccgcatccattacactgagatgtatgaaatgctgactctcatgtcacctccgctaggcctcggcaagagatgtccctccaaagtggcatataagaggttggtcctgatgaacatgccagtagctgaggacatgacggtccacttcacctccacacttatggctctgatccggacagctctggacattaaaattgccaaaggtggtgcagacaggcagcagctagactcagagctacaaaaggagaccctagccatctggcctcacctatcccagaagatgctggatctgcttgtgcccatgcccaaagcctctgacctgactgtgggcaaaatctatgcagcaatgatgatcatggactactataagcagagtaaggtgaagaagcagaggcagcagctggaggaacagaaaaatgcccccatgttccagcgcatggagccttcatctctgcctcaggagatcattgctaatgccaaagccctgccttacctccagcaggaccccgtttcaggcctgagtggccggagtggatacccttcgatgagtccactctctccccaggatatattccagttggcttgtatggaccccgccgatgacggacagttccaagaacggcagtctctggagccagaggttagtgaattaaaaagcgtgcagccctctaaccatggcatctaccttccttcggacacccaggagcatgcgggatctgggagggcatcttctatgccacgtctgactgtggatccccaggtggtgacagaccctagctccatgagacgttcattttccactattcgggataagcgttcaaattcctcgtggttggaggaattctccatggagcgaagcagtgaaaatacctacaagtcccgtcgccggagttaccactcctccttgcggctgtcagcccaccgcctgaactctgattcaggccacaagtctgacactcaccgctcagggggcagggagcggggacgatcaaaagagcgaaagcatcttctctctcctgatgtctcccgctgcaattcagaagagcgagggacccaggctgactgggagtccccagagcgccgtcaatccaggtcacccagtgagggcaggtcacagacgcccaacagacagggcacaggttccctaagtgagagctccatcccctctgtctctgacaccagcaccccaagaagaagtcgtcggcagctcccacccgtcccgccaaagccccggcccctcctttcctacagctccctgattcgacacgcgggcagcatctctccacctgctgatggaagcgaggagggctccccgctgacctcccaagctctggagagcaacaatgcttgcctgaccgagtcttccaactctccgcacccccagcagagccaacatgcctccccacagcgctacatctccgagccctacttggccctgcacgaagactcccacgcctcagactgtggtgaggaggagacgctcactttcgaagcagccgtggctactagcctgggccgttccaacaccatcggctcagccccacccctgcggcatagctggcagatgcccaacgggcactatcggcggcggaggcgcggggggcctgggccaggcatgatgtgtggggctgtcaacaacctgctaagtgacacggaagaagatgacaaatgctagaggctgctcccccctccgatgcatgctcttctctcacatggagaaaaccaagacagaattgggaagccagtgcggcccgggggggaggaagagggaaaaggaagatggaaggacaccatgcattatcagagaagaggaagtaaaggacaatcagaacaccagtcaaacccaccaaattgctttattcccctttgcaagatgggcactgccatagttctgcctctttgctggggaaagaaaccaggaacgtggagggttattactgcgggagaagggacacgaggatggctttgcttccccttgccccttcccacttttctaaaagctgtggagggatctagctggcctatgtctacactcagtgccctgagaagcctggaagactttctggctcttaactggggagtagtggagaccataggagaggactctcctccctcaccagctcttacgcctcagccagcaccactgccaccagggcaactgcagcagcatctcatgcataaccctgtggcttgcttcccccagggcagcacaggctaagtcaggaacatcggatgccagggagggaggagaaagccgaagcgaaaggggtcagggtgctgaggcaacagcagcaagggctggtctggacaagaaaagccatagcccggcagcccctaccatgagggagacagagaaacagaactggtggtgctggggggtatagccccccatccttgaggcctgtcacccacacagtaggtgctgagagttaggacaggtcaggaagtcccccagggtccacaaaggtgcctgaggctctggtaagggtgaagataaaagtatttaacaaccgctatggcatcaatgtaagtggagtttggtcctagtgccggagcccatgctattccaggcattggctctttagatgccagtcatgggggaaccctgagggtgtgggtagagtagcaggggccacctaagagattaaaaacagagtctgttttccaaccagtgtggaagcaattaaatatacgtaacagtgctacggccacaccagcacctcctggctgaaggtcagcccacactctggtccatgaggcagcaaggccagtgctgtgccaagcccggtaaggccaagtgccgaggcccagccttccctgccactcctctgagagggcagaacacacatatccaagtaggctacccaccactgggtagggatttctgtaaagatgggaaaggctgatagattgaaataagcttctgtgaaagtctggatttactgaggacctcccctgaggagggaccgttgggaccgcagattctgcagctggtgtggggttcaggtcagtttgtcaggatgctttaaggtgattagtaaatatacctcagcttagacttgggctgctccttctagcaaagcaggctccagtggggcctcatcatacaggatgacaagactggggccctgttcaccttgaacatgcccctgggccaagatggggcttcacccctccccagagtaagagctggggctgacagtcccaccctgtcattcctaatagcccaaacgcagaagcactgagcaagagagccctttcttgccaagccagtgctcttttggtatatggcatacagctccattggaggggacacatcactggctttatctggtggaaatgtacctttcccttaagttcctccttagtgccatcacagcaggtgaatgggtgccctacggggccctccttcccccaccaggaacagatggaacctgccacccaggatcctgatctgccctgcactgagcactcagtggataaacactcctccagcccagacacactcctcctcttgggcaggagcaatccagagttgttatttttcttagaaggagcctcttttccctctattttttaaattgaaatataatagctgcatcagccctgaaaagccaaattcaaccacatggctggagaatcatttgtcatggccccgccttctcttctgatactaatggagcttcatgacccacggtcagcccccaaaccaaagttgtcccaacagaggaggccagtgaggcagagacagagctctcccactctcagaccctcttttgtcttcattttcctctcccacttagcacatgtgtgcttgagggtggctgggaatgtgatatacagcaccctgatcctaacaggtgtgattgttacgtaagacgctgatactgggccttgtattgcttttaaagtttcctctgctcagcatcatttcatgccaaagtgctgctatgggctgctttgtgtgcacaaaattgctttttccacctcggaaatgcagctttccctagggggaggcctacaacaggacgaccattctgagccagtgagtctattgcatggtgttttgagaaagggaattttagtgacaccttatgccatttcaagaggagaaatgcaggctggcagagcaatttccagaaatggaatttgcctgcaaatagtataaacaacactaaatttactgtgccaggaaatcttcctgaactccttgaactcatacacacaggtatttgagtcctgaataaagtgttggaaagcactgcagatgcggtcacctgactgaccacctgggttttctattaccagtgaatttcttttattcaccttcccttgaccaagaaattgggtttcttttccctcagcctgcacttactcttctattaagaccagaaaataaaataattttccgttgagtcac

SEQ ID NO: 1283 - protein, 1924 aa, Homo sapiens
MKLRRQQQIERELNGYRAWIDKAEEVMLAEENKNAGTSALEVLRRATIKRSRTEAMTRDSSDEHCVDISSVGTPLARASIKSAKVDGVSYFRHKERLLRISIRHMVKSQVFYWIVLSLVNTACVAIVHHNQPQWLTHLLYYAEFLFLGLFLLEMSLKMYGMGPRLYFHSSFNCFDFGVTVGSIFEVVWAIFRPGTSFGISVLRALRLLRIFKITKYWASLRNLVVSLMSSMKSIISLLFLLFLFIVVFALLGMQLFGGRFNFNDGTPSANFDTFPAAIMTVFQILTGEDWNEVMYNGIRSQGGVSSGMWSAIYFIVLTLFGNYTLLNVFLAIAVDNLANAQELTKDEQEEEEAFNQKHALQKAKEVSPMSAPNMPSIERDRRRRHHMSMWEPRSSHLRERRRRHHMSVWEQRTSQLRKHMQMSSQEALNREEAPTMNPLNPLNPLSSLNPLNAHPSLYRRPRAIEGLALGLALEKFEEERISRGGSLKGDGGDRSSALDNQRTPLSLGQREPPWLARPCHGNCDPTQQEAGGGEAVVTFEDRARHRQSQRRSRHRRVRTEGKESSSASRSRSASQERSLDEAMPTEGEKDHELRGNHGAKEPTIQEERAQDLRRTNSLMVSRGSGLAGGLDEADTPLVLPHPELEVGKHVVLTEQEPEGSSEQALLGNVQLDMGRVISQSEPDLSCITANTDKATTESTSVTVAIPDVDPLVDSTVVHNKTDGEDLKEAEIREDEEEVEKKKQKKEKRETGKAMVPHSSMFIFSTTNPIRRACHYIVNLRYFEMCILLVIAASSIAAEDPVLTNSNKVLRYFDYVFTGVFTFEMVIKMIDQGLILQDGSYFRDLWNILDFVVVVGALVAFATNKGRDIKTIKSLRVLRVLRPLKTIKRLPKLKAVFDCVVTSLKNVFNILIVYKLFMFIFAVIAVQLFKGKFFYCTDSSKDTEKECIGNYVDHEKNKMEVKGREWKRHEFHYDNIIWALLTLFTVSTGEGWPQVLQHSVDVTEEDRGPSRSNRMEMSIFYVVYFVVFPFFFVNIFVIIITFQEQGDKMMEECSLEKNERACIDFAISAKPLTRYMPQNRHTFQYRVWHFVVSPSFEYTIMAMIALNTVVLMMKYYSAPCTYELALKYLNIAFTMVFSLECVLKVIAFGFLNYFRDTWNIFDFITVIGSITEIILTDSKLVNTSGFNMSFLKLFRAARLIKLLRQGYTIRILLWTFVQSFKALPYVCLLIAMLFFIYAIIGMQVFGNIKLDEESHINRHNNFRSFFGSLMLLFRSATGEAWQEIMLSCLGEKGCEPDTTAPSGQNENERCGTDLAYVYFVSFIFFCSFLMLNLFVAVIMDNFEYLTRDSSILGPHHLDEFVRVWAEYDRAACGRIHYTEMYEMLTLMSPPLGLGKRCPSKVAYKRLVLMNMPVAEDMTVHFTSTLMALIRTALDIKIAKGGADRQQLDSELQKETLAIWPHLSQKMLDLLVPMPKASDLTVGKIYAAMMIMDYYKQSKVKKQRQQLEEQKNAPMFQRMEPSSLPQEIIANAKALPYLQQDPVSGLSGRSGYPSMSPLSPQDIFQLACMDPADDGQFQERQSLEPEVSELKSVQPSNHGIYLPSDTQEHAGSGRASSMPRLTVDPQVVTDPSSMRRSFSTIRDKRSNSSWLEEFSMERSSENTYKSRRRSYHSSLRLSAHRLNSDSGHKSDTSGGRERGRSKERKHLLSPDVSRCNSEERGTQADWESPERRQSRSPSEGRSQTPNRQGTGSLSESSIPSVSDTSTPRRSRRQLPPVPPKPRPLLSYSSLIRHAGSISPPADGSEEGSPLTSQALESNNACLTESSNSPHPQQSQHDQRYISEPYLALHEDSHASDCGEEETLTFEAAVATSLGRSNTIGSAPPLRHSWQMPNGHYRRRRRGGPGPGMMCGAVNNLLSDTEEDDKC

SEQ ID NO: 1284 - DNA, 8517 bp, Homo sapiens
gtgaatcttatccttcttgtccacagggaatttgccaaagagagagagagagtggagaaccgaagggctttcatgaagctgcggcgccagcagcagattgagcgtgagctgaatggctaccgtgcctggatagacaaagcagaggaagtcatgctcgctgaagaaaataaaaatgctggaacatccgccttagaagtgcttcgaagggcaaccatcaagaggagccggacagaggccatgactcgagactccagtgatgagcactgtgttgatatctcctctgtgggcacacctctggcccgagccagtatcaaaagtgcaaaggtagacggggtctcttatttccggcacaaggaaaggcttctgcgcatctccattcgccacatggttaaatcccaggtgttttactggattgtgctgagccttgtggcactcaacactgcctgtgtggccattgtccatcacaaccagccccagtggctcacccacctcctctactatgcagaatttctgtttctgggactcttcctcttggagatgtccctgaagatgtatggcatggggcctcgcctttattttcactcttcattcaactgctttgattttggggtcacagtgggcagtatctttgaagtggtctgggcaatcttcagacctggtacgtcttttggaatcagtgtcttgcgagccctccggcttctaagaatatttaaaataaccaagtattgggcttccctacggaatttggtggtctccttgatgagctcaatgaagtctatcatcagtttgcttttcctcctcttcctcttcatcgttgtctttgctctcctaggaatgcagttatttggaggcaggtttaactttaatgatgggactccttcggcaaattttgataccttccctgcagccatcatgactgtgttccagatcctgacgggtgaggactggaatgaggtgatgtacaatgggatccgctcccagggtggggtcagctcaggcatgtggtctgccatctacttcattgtgctcaccttgtttggcaactacacgctactgaatgtgttcttggctatcgctgtggataatctcgccaacgcccaggaactgaccaaggatgaacaggaggaagaagaggccttcaaccagaaacatgcactgcagaaggccaaggaggtcagcccgatgtctgcacccaacatgccttcgatcgaaagagacagaaggagaagacaccacatgtcgatgtgggagccacgcagcagccacctgagggagcggaggcgccggcaccacatgtccgtgtgggagcagcgtaccagccagctgaggaagcacatgcagatgtccagccaggaggccctcaacagagaggaggcgccgaccatgaacccgctcaaccccctcaacccgctcagctccctcaacccgctcaatgcccaccccagcctttatcggcgacccagggccattgagggcctggccctgggcctggccctggagaagttcgaggaggagcgcatcagccgtggggggtccctcaagggggatggaggggaccgatccagtgccctggacaaccagaggacccctttgtccctgggccagcgggagccaccatggctggccaggccctgtcatggaaactgtgacccgactcagcaggaggcagggggaggagaggctgtggtgacctttgaggaccgggccaggcacaggcagagccaacggcgcagccggcatcgccgcgtcaggacagaaggcaaggagtcctcttcagcctcccggagcaggtctgccagccaggaacgcagtctggatgaagccatgcccactgaaggggagaaggaccatgagctcaggggcaaccatggtgccaaggagccaacgatccaagaagagagagcccaggatttaaggaggaccaacagtctgatggtgtccagaggctccgggctggcaggaggccttgatgaggctgacacccccctagtcctgccccatcctgagctggaagtggggaagcacgtggtgctgacggagcaggagccagaaggcagcagtgagcaggccctgctggggaatgtgcagctagacatgggccgggtcatcagccagagcgagcctgacctctcctgcatcacggccaacacggacaaggccaccaccgagagcaccagcgtcaccgtcgccatccccgacgtggaccccttggtggactcaaccgtggtgcacattagcaacaagacggatggggaagccagtcccttgaaggaggcagagatcagagaggatgaggaggaggtggagaagaagaagcagaagaaggagaagcgtgagacaggcaaagccatggtgccccacagctcaatgttcatcttcagcaccaccaacccgatccggagggcctgccactacatcgtgaacctgcgctactttgagatgtgcatcctcctggtgattgcagccagcagcatcgccctggcggcagaggaccccgtcctgaccaactcggagcgcaacaaagtcctgaggtattttgactatgtgttcacgggcgtgttcacctttgagatggttataaagatgatagaccaaggcttgatcctgcaggatgggtcctacttccgagacttgtggaacatcctggactttgtggtggtcgttggcgcattggtggcctttgctctggcaaccaacaaaggacgggacatcaagaccatcaagtctctgcgggtgctccgagttctaaggccactgaaaaccatcaagcgcttgcccaagctcaaggccgtcttcgactgcgtagtgacctccttgaagaatgtcttcaacatactcattgtgtacaagctcttcatgttcatctttgctgtcatcgcagttcagctcttcaagggaaagttcttttattgcacggacagttccaaggacacagagaaggagtgcataggcaactatgtagatcatgagaaaaacaagatggaggtgaagggccgggaatggaagcgccatgaattccactacgacaacattatctgggccctgctgaccctcttcaccgtctccacaggggaaggatggcctcaagttctgcagcactctgtagatgtgacagaggaagaccgaggcccaagccgcagcaaccgcatggagatgtctatcttttatgtagtctactttgtggtcttccccttcttctttgtcaatatctttgtggctctcatcatcatcaccttccaggagcaaggggataagatgatggaggagtgcagcctggagaagaatgagagggcgtgcatcgacttcgccatcagcgccaaacctctcacccgctacatgccgcagaacagacacaccttccagtaccgcgtgtggcactttgtggtgtctccgtcctttgagtacaccattatggccatgatcgccttgaatactgttgtgctgatgatgaagtattattctgctccctgtacctatgagctggccctgaagtacctgaatatcgccttcaccatggtgttttccctggaatgtgtcctgaaggtcatcgcttttggctttttgaactatttccgagacacctggaatatctttgacttcatcaccgtgattggcagtatcacagaaattatcctgacagacagcaagctggtgaacaccagtggcttcaatatgagctttctgaagctcttccgagctgcccgcctcataaagctcctgcgtcagggctataccatacgcattttgctgtggacctttgtgcagtcctttaaggccctcccttatgtctgccttttaattgccatgcttttcttcatttatgccatcattgggatgcaggtatttggaaacataaaattagacgaggagagtcacatcaaccggcacaacaacttccggagtttctttgggtccctaatgctactcttcaggagtgccacaggtgaggcctggcaggagattatgctgtcatgccttggggagaagggctgtgagcctgacaccaccgcaccatcagggcagaacgagaacgaacgctgcggcaccgatctggcctacgtgtactttgtctccttcatcttcttctgctccttcttgatgctcaacctgtttgtggccgtcatcatggacaactttgagtacctgactcgggactcctccatcctggggcctcaccacttggacgagtttgtccgcgtctgggcagaatatgaccgagcagcatgtggccgcatccattacactgagatgtatgaaatgctgactctcatgtcacctccgctaggcctcggcaagagatgtccctccaaagtggcatataagaggttggtcctgatgaacatgccagtagctgaggacatgacggtccacttcacctccacacttatggctctgatccggacagctctggacattaaaattgccaaaggtggtgcagacaggcagcagctagactcagagctacaaaaggagaccctagccatctggcctcacctatcccagaagatgctggatctgcttgtgcccatgcccaaagcctctgacctgactgtgggcaaaatctatgcagcaatgatgatcatggactactataagcagagtaaggtgaagaagcagaggcagcagctggaggaacagaaaaatgcccccatgttccagcgcatggagccttcatctctgcctcaggagatcattgctaatgccaaagccctgccttacctccagcaggaccccgtttcaggcctgagtggccggagtggatacccttcgatgagtccactctctccccaggatatattccagttggcttgtatggaccccgccgatgacggacagttccaagaacggcagtctctggtggtgacagaccctagctccatgagacgttcattttccactattcgggataagcgttcaaattcctcgtggttggaggaattctccatggagcgaagcagtgaaaatacctacaagtcccgtcgccggagttaccactcctccttgcggctgtcagcccaccgcctgaactctgattcaggccacaagtctgacactcaccgctcagggggcagggagcggggacgatcaaaagagcgaaagcatcttctctctcctgatgtctcccgctgcaattcagaagagcgagggacccaggctgactgggagtccccagagcgccgtcaatccaggtcacccagtgagggcaggtcacagacgcccaacagacagggcacaggttccctaagtgagagctccatcccctctgtctctgacaccagcaccccaagaagaagtcgtcggcagctcccacccgtcccgccaaagccccggcccctcctttcctacagctccctgattcgacacgcgggcagcatctctccacctgctgatggaagcgaggagggctccccgctgacctcccaagctctggagagcaacaatgcttgcctgaccgagtcttccaactctccgcacccccagcagagccaacatgcctccccacagcgctacatctccgagccctacttggccctgcacgaagactcccacgcctcagactgtggtgaggaggagacgctcactttcgaagcagccgtggctactagcctgggccgttccaacaccatcggctcagccccacccctgcggcatagctggcagatgcccaacgggcactatcggcggcggaggcgcggggggcctgggccaggcatgatgtgtggggctgtcaacaacctgctaagtgacacggaagaagatgacaaatgctagaggctgctcccccctccgatgcatgctcttctctcacatggagaaaaccaagacagaattgggaagccagtgcggcccgggggggaggaagagggaaaaggaagatggaaggacaccatgcattatcagagaagaggaagtaaaggacaatcagaacaccagtcaaacccaccaaattgctttattcccctttgcaagatgggcactgccatagttctgcctctttgctggggaaagaaaccaggaacgtggagggttattactgcgggagaagggacacgaggatggctttgcttccccttgccccttcccacttttctaaaagctgtggagggatctagctggcctatgtctacactcagtgccctgagaagcctggaagactttctggctcttaactggggagtagtggagaccataggagaggactctcctccctcaccagctcttacgcctcagccagcaccactgccaccagggcaactgcagcagcatctcatgcataaccctgtggcttgcttcccccagggcagcacaggctaagtcaggaacatcggatgccagggagggaggagaaagccgaagcgaaaggggtcagggtgctgaggcaacagcagcaagggctggtctggacaagaaaagccatagcccggcagcccctaccatgagggagacagagaaacagaactggtggtgctggggggtatagccccccatccttgaggcctgtcacccacacagtaggtgctgagagttaggacaggtcaggaagtcccccagggtccacaaaggtgcctgaggctctggtaagggtgaagataaaagtatttaacaaccgctatggcatcaatgtaagtggagtttggtcctagtgccggagcccatgctattccaggcattggctctttagatgccagtcatgggggaaccctgagggtgtgggtagagtagcaggggccacctaagagattaaaaacagagtctgttttccaaccagtgtggaagcaattaaatatacgtaacagtgctacggccacaccagcacctcctggctgaaggtcagcccacactctggtccatgaggcagcaaggccagtgctgtgccaagcccggtaaggccaagtgccgaggcccagccttccctgccactcctctgagagggcagaacacacatatccaagtaggctacccaccactgggtagggatttctgtaaagatgggaaaggctgatagattgaaataagcttctgtgaaagtctggatttactgaggacctcccctgaggagggaccgttgggaccgcagattctgcagctggtgtggggttcaggtcagtttgtcaggatgctttaaggtgattagtaaatatacctcagcttagacttgggctgctccttctagcaaagcaggctccagtggggcctcatcatacaggatgacaagactggggccctgttcaccttgaacatgcccctgggccaagatggggcttcacccctccccagagtaagagctggggctgacagtcccaccctgtcattcctaatagcccaaacgcagaagcactgagcaagagagccctttcttgccaagccagtgctcttttggtatatggcatacagctccattggaggggacacatcactggctttatctggtggaaatgtacctttcccttaagttcctccttagtgccatcacagcaggtgaatgggtgccctacggggccctccttcccccaccaggaacagatggaacctgccacccaggatcctgatctgccctgcactgagcactcagtggataaacactcctccagcccagacacactcctcctcttgggcaggagcaatccagagttgttatttttcttagaaggagcctcttttccctctattttttaaattgaaatataatagctgcatcagccctgaaaagccaaattcaaccacatggctggagaatcatttgtcatggccccgccttctcttctgatactaatggagcttcatgacccacggtcagcccccaaaccaaagttgtcccaacagaggaggccagtgaggcagagacagagctctcccactctcagaccctcttttgtcttcattttcctctcccacttagcacatgtgtgcttgagggtggctgggaatgtgatatacagcaccctgatcctaacaggtgtgattgttacgtaagacgctgatactgggccttgtattgcttttaaagtttcctctgctcagcatcatttcatgccaaagtgctgctatgggctgctttgtgtgcacaaaattgctttttccacctcggaaatgcagctttccctagggggaggcctacaacaggacgaccattctgagccagtgagtctattgcatggtgttttgagaaagggaattttagtgacaccttatgccatttcaagaggagaaatgcaggctggcagagcaatttccagaaatggaatttgcctgcaaatagtataaacaacactaaatttactgtgccaggaaatcttcctgaactccttgaactcatacacacaggtatttgagtcctgaataaagtgttggaaagcactgcagatgcggtcacctgactgaccacctgggttttctattaccagtgaatttcttttattcaccttcccttgaccaagaaattgggtttcttttccctcagcctgcacttactcttctattaagaccagaaaataaaataattttccgttgagtcac

SEQ ID NO: 1285 - protein, 1881 aa, Homo sapiens
MKLRRQQQIERELNGYRAWIDKAEEVMLAEENKNAGTSALEVLRRATIKRSRTEAMTRDSSDEHCVDISSVGTPLARASIKSAKVDGVSYFRHKERLLRISIRHMVKSQVFYWIVLSLVNTACVAIVHHNQPQWLTHLLYYAEFLFLGLFLLEMSLKMYGMGPRLYFHSSFNCFDFGVTVGSIFEVVWAIFRPGTSFGISVLRALRLLRIFKITKYWASLRNLVVSLMSSMKSIISLLFLLFLFIVVFALLGMQLFGGRFNFNDGTPSANFDTFPAAIMTVFQILTGEDWNEVMYNGIRSQGGVSSGMWSAIYFIVLTLFGNYTLLNVFLAIAVDNLANAQELTKDEQEEEEAFNQKHALQKAKEVSPMSAPNMPSIERDRRRRHHMSMWEPRSSHLRERRRRHHMSVWEQRTSQLRKHMQMSSQEALNREEAPTMNPLNPLNPLSSLNPLNAHPSLYRRPRAIEGLALGLALEKFEEERISRGGSLKGDGGDRSSALDNQRTPLSLGQREPPWLARPCHGNCDPTQQEAGGGEAVVTFEDRARHRQSQRRSRHRRVRTEGKESSSASRSRSASQERSLDEAMPTEGEKDHELRGNHGAKEPTIQEERAQDLRRTNSLMVSRGSGLAGGLDEADTPLVLPHPELEVGKHVVLTEQEPEGSSEQALLGNVQLDMGRVISQSEPDLSCITANTDKATTESTSVTVAIPDVDPLVDSTVVHNKTDGEDLKEAEIREDEEEVEKKKQKKEKRETGKAMVPHSSMFIFSTTNPIRRACHYIVNLRYFEMCILLVIAASSIAAEDPVLTNSNKVLRYFDYVFTGVFTFEMVIKMIDQGLILQDGSYFRDLWNILDFVVVVGALVAFATNKGRDIKTIKSLRVLRVLRPLKTIKRLPKLKAVFDCVVTSLKNVFNILIVYKLFMFIFAVIAVQLFKGKFFYCTDSSKDTEKECIGNYVDHEKNKMEVKGREWKRHEFHYDNIIWALLTLFTVSTGEGWPQVLQHSVDVTEEDRGPSRSNRMEMSIFYVVYFVVFPFFFVNIFVIIITFQEQGDKMMEECSLEKNERACIDFAISAKPLTRYMPQNRHTFQYRVWHFVVSPSFEYTIMAMIALNTVVLMMKYYSAPCTYELALKYLNIAFTMVFSLECVLKVIAFGFLNYFRDTWNIFDFITVIGSITEIILTDSKLVNTSGFNMSFLKLFRAARLIKLLRQGYTIRILLWTFVQSFKALPYVCLLIAMLFFIYAIIGMQVFGNIKLDEESHINRHNNFRSFFGSLMLLFRSATGEAWQEIMLSCLGEKGCEPDTTAPSGQNENERCGTDLAYVYFVSFIFFCSFLMLNLFVAVIMDNFEYLTRDSSILGPHHLDEFVRVWAEYDRAACGRIHYTEMYEMLTLMSPPLGLGKRCPSKVAYKRLVLMNMPVAEDMTVHFTSTLMALIRTALDIKIAKGGADRQQLDSELQKETLAIWPHLSQKMLDLLVPMPKASDLTVGKIYAAMMIMDYYKQSKVKKQRQQLEEQKNAPMFQRMEPSSLPQEIIANAKALPYLQQDPVSGLSGRSGYPSMSPLSPQDIFQLACMDPADDGQFQERQSLVVTDPSSMRRSFSTIRDKRSNSSWLEEFSMERSSENTYKSRRRSYHSSLRLSAHRLNSDSGHKSDTSGGRERGRSKERKHLLSPDVSRCNSEERGTQADWESPERRQSRSPSEGRSQTPNRQGTGSLSESSIPSVSDTSTPRRSRRQLPPVPPKPRPLLSYSSLIRHAGSISPPADGSEEGSPLTSQALESNNACLTESSNSPHPQQSQHDQRYISEPYLALHEDSHASDCGEEETLTFEAAVATSLGRSNTIGSAPPLRHSWQMPNGHYRRRRRGGPGPGMMCGAVNNLLSDTEEDDKC

SEQ ID NO: 1286 - DNA, 9917 bp, Homo sapiens
gatgcgtggactgagcccagaccgcaggctgcccgagcccgccccctgcccggctgcggggagccctgagcccaggtccgcgggccgccgccaacgccacgtcctggccctgccggaagaagaggcatggcggccccagcagtgcgctctgctcgaggccgacgcctcggacgaggtgggcatgctgccggcttccccgcgcgccgcctctggcttcgacaacttcttccaggtgcaggagggcgagggccagggctgggagggcgccatggcactggaggcgggctccagccctttcctgccggtgagccccgaggtcatgaagcggcggcgcgggggcctcatcgagcagcgcgacatcatcaaggcccacgaggcgcacaagatgcagagcaccccgcaggcccggcgcaaggaatgggagatggctcgcttcggggaggcggtggtcgccaggccagggtccggcgatggagactcggaccagagcaggaaccggcaaggaacccccgtgccggcctcggggcaggcggccgcctacaagcagacgaaagcacagagggcgcggactatggctttgtacaaccccattcccgtccggcagaactgtttcaccgtcaacagatccctgttcatcttcggagaagataacattgtcaggaaatatgccaagaagctcatcgattggccgccatttgagtacatgatcctggccaccatcattgccaactgcatcgtcctggccctggagcagcatcttcctgaggatgacaagacccccatgtcccgaagactggagaagacagaaccttatttcattgggatcttttgctttgaagctgggatcaaaattgtggccctggggttcatcttccataagggctcttacctccgcaatggctggaatgtcatggacttcatcgtggtcctcagtggcatcctggccactgcaggaacccacttcaatactcacgtggacctgaggaccctccgggctgtgcgtgtcctgcggcctttgaagctcgtgtcagggatacctagcctgcagattgtgttgaagtccatcatgaaggccatggtacctcttctgcagattggccttctgctcttctttgccatcctgatgtttgctatcattggtttggagttctacagtggcaagttacatcgagcatgcttcatgaacaattcaggtattctagaaggatttgacccccctcacccatgtggtgtgcagggctgcccagctggttatgaatgcaaggactggatcggccccaatgatgggatcacccagtttgataacatcctttttgctgtgctgactgtcttccagtgcatcaccatggaagggtggaccactgtgctgtacaataccaatgatgccttaggagccacctggaattggctgtacttcatccccctcatcatcattggatccttctttgttctcaacctagtcctgggagtgctttccggggaatttgccaaagagagagagagagtggagaaccgaagggctttcatgaagctgcggcgccagcagcagattgagcgtgagctgaatggctaccgtgcctggatagacaaagcagaggaagtcatgctcgctgaagaaaataaaaatgctggaacatccgccttagaagtgcttcgaagggcaaccatcaagaggagccggacagaggccatgactcgagactccagtgatgagcactgtgttgatatctcctctgtgggcacacctctggcccgagccagtatcaaaagtgcaaaggtagacggggtctcttatttccggcacaaggaaaggcttctgcgcatctccattcgccacatggttaaatcccaggtgttttactggattgtgctgagccttgtggcactcaacactgcctgtgtggccattgtccatcacaaccagccccagtggctcacccacctcctctactatgcagaatttctgtttctgggactcttcctcttggagatgtccctgaagatgtatggcatggggcctcgcctttattttcactcttcattcaactgctttgattttggggtcacagtgggcagtatctttgaagtggtctgggcaatcttcagacctggtacgtcttttggaatcagtgtcttgcgagccctccggcttctaagaatatttaaaataaccaagtattgggcttccctacggaatttggtggtctccttgatgagctcaatgaagtctatcatcagtttgcttttcctcctcttcctcttcatcgttgtctttgctctcctaggaatgcagttatttggaggcaggtttaactttaatgatgggactccttcggcaaattttgataccttccctgcagccatcatgactgtgttccagatcctgacgggtgaggactggaatgaggtgatgtacaatgggatccgctcccagggtggggtcagctcaggcatgtggtctgccatctacttcattgtgctcaccttgtttggcaactacacgctactgaatgtgttcttggctatcgctgtggataatctcgccaacgcccaggaactgaccaaggatgaacaggaggaagaagaggccttcaaccagaaacatgcactgcagaaggccaaggaggtcagcccgatgtctgcacccaacatgccttcgatcgagagggagcggaggcgccggcaccacatgtccgtgtgggagcagcgtaccagccagctgaggaagcacatgcagatgtccagccaggaggccctcaacagagaggaggcgccgaccatgaacccgctcaaccccctcaacccgctcagctccctcaacccgctcaatgcccaccccagcctttatcggcgacccagggccattgagggcctggccctgggcctggccctggagaagttcgaggaggagcgcatcagccgtggggggtccctcaagggggatggaggggaccgatccagtgccctggacaaccagaggacccctttgtccctgggccagcgggagccaccatggctggccaggccctgtcatggaaactgtgacccgactcagcaggaggcagggggaggagaggctgtggtgacctttgaggaccgggccaggcacaggcagagccaacggcgcagccggcatcgccgcgtcaggacagaaggcaaggagtcctcttcagcctcccggagcaggtctgccagccaggaacgcagtctggatgaagccatgcccactgaaggggagaaggaccatgagctcaggggcaaccatggtgccaaggagccaacgatccaagaagagagagcccaggatttaaggaggaccaacagtctgatggtgtccagaggctccgggctggcaggaggccttgatgaggctgacacccccctagtcctgccccatcctgagctggaagtggggaagcacgtggtgctgacggagcaggagccagaaggcagcagtgagcaggccctgctggggaatgtgcagctagacatgggccgggtcatcagccagagcgagcctgacctctcctgcatcacggccaacacggacaaggccaccaccgagagcaccagcgtcaccgtcgccatccccgacgtggaccccttggtggactcaaccgtggtgcacattagcaacaagacggatggggaagccagtcccttgaaggaggcagagatcagagaggatgaggaggaggtggagaagaagaagcagaagaaggagaagcgtgagacaggcaaagccatggtgccccacagctcaatgttcatcttcagcaccaccaacccgatccggagggcctgccactacatcgtgaacctgcgctactttgagatgtgcatcctcctggtgattgcagccagcagcatcgccctggcggcagaggaccccgtcctgaccaactcggagcgcaacaaagtcctgaggtattttgactatgtgttcacgggcgtgttcacctttgagatggttataaagatgatagaccaaggcttgatcctgcaggatgggtcctacttccgagacttgtggaacatcctggactttgtggtggtcgttggcgcattggtggcctttgctctggcgtaaaaccaacaaaggacgggacatcaagaccatcaagtctctgcgggtgctccgagttctaaggccactgaaaaccatcaagcgcttgcccaagctcaaggccgtcttcgactgcgtagtgacctccttgaagaatgtcttcaacatactcattgtgtacaagctcttcatgttcatctttgctgtcatcgcagttcagctcttcaagggaaagttcttttattgcacggacagttccaaggacacagagaaggagtgcataggcaactatgtagatcatgagaaaaacaagatggaggtgaagggccgggaatggaagcgccatgaattccactacgacaacattatctgggccctgctgaccctcttcaccgtctccacaggggaaggatggcctcaagttctgcagcactctgtagatgtgacagaggaagaccgaggcccaagccgcagcaaccgcatggagatgtctatcttttatgtagtctactttgtggtcttccccttcttctttgtcaatatctttgtggctctcatcatcatcaccttccaggagcaaggggataagatgatggaggagtgcagcctggagaagaatgagagggcgtgcatcgacttcgccatcagcgccaaacctctcacccgctacatgccgcagaacagacacaccttccagtaccgcgtgtggcactttgtggtgtctccgtcctttgagtacaccattatggccatgatcgccttgaatactgttgtgctgatgatgaagtattattctgctccctgtacctatgagctggccctgaagtacctgaatatcgccttcaccatggtgttttccctggaatgtgtcctgaaggtcatcgcttttggctttttgaactatttccgagacacctggaatatctttgacttcatcaccgtgattggcagtatcacagaaattatcctgacagacagcaagctggtgaacaccagtggcttcaatatgagctttctgaagctcttccgagctgcccgcctcataaagctcctgcgtcagggctataccatacgcattttgctgtggacctttgtgcagtcctttaaggccctcccttatgtctgccttttaattgccatgcttttcttcatttatgccatcattgggatgcaggtatttggaaacataaaattagacgaggagagtcacatcaaccggcacaacaacttccggagtttctttgggtccctaatgctactcttcaggagtgccacaggtgaggcctggcaggagattatgctgtcatgccttggggagaagggctgtgagcctgacaccaccgcaccatcagggcagaacgagaacgaacgctgcggcaccgatctggcctacgtgtactttgtctccttcatcttcttctgctccttcttgatgctcaacctgtttgtggccgtcatcatggacaactttgagtacctgactcgggactcctccatcctggggcctcaccacttggacgagtttgtccgcgtctgggcagaatatgaccgagcagcatgtggccgcatccattacactgagatgtatgaaatgctgactctcatgtcacctccgctaggcctcggcaagagatgtccctccaaagtggcatataagaggttggtcctgatgaacatgccagtagctgaggacatgacggtccacttcacctccacacttatggctctgatccggacagctctggacattaaaattgccaaaggtggtgcagacaggcagcagctagactcagagctacaaaaggagaccctagccatctggcctcacctatcccagaagatgctggatctgcttgtgcccatgcccaaagcctctgacctgactgtgggcaaaatctatgcagcaatgatgatcatggactactataagcagagtaaggtgaagaagcagaggcagcagctggaggaacagaaaaatgcccccatgttccagcgcatggagccttcatctctgcctcaggagatcattgctaatgccaaagccctgccttacctccagcaggaccccgtttcaggcctgagtggccggagtggatacccttcgatgagtccactctctccccaggatatattccagttggcttgtatggaccccgccgatgacggacagttccaagaacggcagtctctggtggtgacagaccctagctccatgagacgttcattttccactattcgggataagcgttcaaattcctcgtggttggaggaattctccatggagcgaagcagtgaaaatacctacaagtcccgtcgccggagttaccactcctccttgcggctgtcagcccaccgcctgaactctgattcaggccacaagtctgacactcaccgctcagggggcagggagcggggacgatcaaaagagcgaaagcatcttctctctcctgatgtctcccgctgcaattcagaagagcgagggacccaggctgactgggagtccccagagcgccgtcaatccaggtcacccagtgagggcaggtcacagacgcccaacagacagggcacaggttccctaagtgagagctccatcccctctgtctctgacaccagcaccccaagaagaagtcgtcggcagctcccacccgtcccgccaaagccccggcccctcctttcctacagctccctgattcgacacgcgggcagcatctctccacctgctgatggaagcgaggagggctccccgctgacctcccaagctctggagagcaacaatgcttgcctgaccgagtcttccaactctccgcacccccagcagagccaacatgcctccccacagcgctacatctccgagccctacttggccctgcacgaagactcccacgcctcagactgtggtgaggaggagacgctcactttcgaagcagccgtggctactagcctgggccgttccaacaccatcggctcagccccacccctgcggcatagctggcagatgcccaacgggcactatcggcggcggaggcgcggggggcctgggccaggcatgatgtgtggggctgtcaacaacctgctaagtgacacggaagaagatgacaaatgctagaggctgctcccccctccgatgcatgctcttctctcacatggagaaaaccaagacagaattgggaagccagtgcggcccgggggggaggaagagggaaaaggaagatggaaggacaccatgcattatcagagaagaggaagtaaaggacaatcagaacaccagtcaaacccaccaaattgctttattcccctttgcaagatgggcactgccatagttctgcctctttgctggggaaagaaaccaggaacgtggagggttattactgcgggagaagggacacgaggatggctttgcttccccttgccccttcccacttttctaaaagctgtggagggatctagctggcctatgtctacactcagtgccctgagaagcctggaagactttctggctcttaactggggagtagtggagaccataggagaggactctcctccctcaccagctcttacgcctcagccagcaccactgccaccagggcaactgcagcagcatctcatgcataaccctgtggcttgcttcccccagggcagcacaggctaagtcaggaacatcggatgccagggagggaggagaaagccgaagcgaaaggggtcagggtgctgaggcaacagcagcaagggctggtctggacaagaaaagccatagcccggcagcccctaccatgagggagacagagaaacagaactggtggtgctggggggtatagccccccatccttgaggcctgtcacccacacagtaggtgctgagagttaggacaggtcaggaagtcccccagggtccacaaaggtgcctgaggctctggtaagggtgaagataaaagtatttaacaaccgctatggcatcaatgtaagtggagtttggtcctagtgccggagcccatgctattccaggcattggctctttagatgccagtcatgggggaaccctgagggtgtgggtagagtagcaggggccacctaagagattaaaaacagagtctgttttccaaccagtgtggaagcaattaaatatacgtaacagtgctacggccacaccagcacctcctggctgaaggtcagcccacactctggtccatgaggcagcaaggccagtgctgtgccaagcccggtaaggccaagtgccgaggcccagccttccctgccactcctctgagagggcagaacacacatatccaagtaggctacccaccactgggtagggatttctgtaaagatgggaaaggctgatagattgaaataagcttctgtgaaagtctggatttactgaggacctcccctgaggagggaccgttgggaccgcagattctgcagctggtgtggggttcaggtcagtttgtcaggatgctttaaggtgattagtaaatatacctcagcttagacttgggctgctccttctagcaaagcaggctccagtggggcctcatcatacaggatgacaagactggggccctgttcaccttgaacatgcccctgggccaagatggggcttcacccctccccagagtaagagctggggctgacagtcccaccctgtcattcctaatagcccaaacgcagaagcactgagcaagagagccctttcttgccaagccagtgctcttttggtatatggcatacagctccattggaggggacacatcactggctttatctggtggaaatgtacctttcccttaagttcctccttagtgccatcacagcaggtgaatgggtgccctacggggccctccttcccccaccaggaacagatggaacctgccacccaggatcctgatctgccctgcactgagcactcagtggataaacactcctccagcccagacacactcctcctcttgggcaggagcaatccagagttgttatttttcttagaaggagcctcttttccctctattttttaaattgaaatataatagctgcatcagccctgaaaagccaaattcaaccacatggctggagaatcatttgtcatggccccgccttctcttctgatactaatggagcttcatgacccacggtcagcccccaaaccaaagttgtcccaacagaggaggccagtgaggcagagacagagctctcccactctcagaccctcttttgtcttcattttcctctcccacttagcacatgtgtgcttgagggtggctgggaatgtgatatacagcaccctgatcctaacaggtgtgattgttacgtaagacgctgatactgggccttgtattgcttttaaagtttcctctgctcagcatcatttcatgccaaagtgctgctatgggctgctttgtgtgcacaaaattgctttttccacctcggaaatgcagctttccctagggggaggcctacaacaggacgaccattctgagccagtgagtctattgcatggtgttttgagaaagggaattttagtgacaccttatgccatttcaagaggagaaatgcaggctggcagagcaatttccagaaatggaatttgcctgcaaatagtataaacaacactaaatttactgtgccaggaaatcttcctgaactccttgaactcatacacacaggtatttgagtcctgaataaagtgttggaaagcactgcagatgcggtcacctgactgaccacctgggttttctattaccagtgaatttcttttattcaccttcccttgaccaagaaattgggtttcttttccctcagcctgcacttactcttctattaagaccagaaaataaaataattttccgttgagtcac

SEQ ID NO: 1287 - protein, 1344 aa, Homo sapiens
MRGLSPDRRLPEPAPCPAAGSPEPRSAGRRQRHVLALPEEEAWRPQQCALLEADASDEVGMLPDRAASGFDNFFQVQEGEGQGWEGAMALEAGSSPFLPVSPEVMKRRRGGLIEQRDIIKAHEAHKMQSTPQARRKEWEMARFGEAVVARPGSGDGDSDQSRNRQGTPVPASGQAAAYKQTKAQRARTMALYNPIPVRQNCFTVNRSLFIFGEDNIVRKYAKKLIDWPPFEYMILATIIANCIVLALEQHLPEDDKTPMSRRLEKTEPYFIGIFCFEAGIKIVGFIFHKGSYLRNGWNVMDFIVVLSGILATAGTHFNTHVDLRTLRAVRVLRPLKLVSGIPSLQIVLKSIMKAMVPLLQIGLLLFFAILMFAIIGLEFYSGKLHRACFMNNSGIGFDPPHPCGVQGCPAGYECKDWIGPNDGITQFDNILFAVLTVFQCITMEGWTTVLYNTNDALGATWNWLYFIPLIIIGSFFVLNLVLGVLSGEFAKERERVENRRAFMKLRRQQQIERELNGYRAWIDKAEEVMLAEENKNAGTSALEVLRRATIKRSRTEAMTRDSSDEHCVDISSVGTPLARASIKSAKVDGVSYFRHKERLLRISIRHMVKSQVFYWIVLSLVNTACVAIVHHNQPQWLTHLLYYAEFLFLGLFLLEMSLKMYGMGPRLYFHSSFNCFDFGVTVGSIFEVVWAIFRPGTSFGISVLRALRLLRIFKITKYWASLRNLVVSLMSSMKSIISLLFLLFLFIVVFALLGMQLFGGRFNFNDGTPSANFDTFPAAIMTVFQILTGEDWNEVMYNGIRSQGGVSSGMWSAIYFIVLTLFGNYTLLNVFLAIAVDNLANAQELTKDEQEEEEAFNQKHALQKAKEVSPMSAPNMPSIERERRRRHHMSVWEQRTSQLRKHMQMSSQEALNREEAPTMNPLNPLNPLSSLNPLNAHPSLYRRPRAIEGLALGLALEKFEEERISRGGSLKGDGGDRSSALDNQRTPLSLGQREPPWLARPCHGNCDPTQQEAGGGEAVVTFEDRARHRQSQRRSRHRRVRTEGKESSSASRSRSASQERSLDEAMPTEGEKDHELRGNHGAKEPTIQEERAQDLRRTNSLMVSRGSGLAGGLDEADTPLVLPHPELEVGKHVVLTEQEPEGSSEQALLGNVQLDMGRVISQSEPDLSCITANTDKATTESTSVTVAIPDVDPLVDSTVVHNKTDGEDLKEAEIREDEEEVEKKKQKKEKRETGKAMVPHSSMFIFSTTNPIRRACHYIVNLRYFEMCILLVIAASSIAAEDPVLTNSNKVLRYFDYVFTGVFTFEMVIKMIDQGLILQDGSYFRDLWNILDFVVVVGALVAFA

SEQ ID NO: 1288 - DNA, 9974 bp, Homo sapiens
gatgcgtggactgagcccagaccgcaggctgcccgagcccgccccctgcccggctgcggggagccctgagcccaggtccgcgggccgccgccaacgccacgtcctggccctgccggaagaagaggcatggcggccccagcagtgcgctctgctcgaggccgacgcctcggacgaggtgggcatgctgccggcttccccgcgcgccgcctctggcttcgacaacttcttccaggtgcaggagggcgagggccagggctgggagggcgccatggcactggaggcgggctccagccctttcctgccggtgagccccgaggtcatgaagcggcggcgcgggggcctcatcgagcagcgcgacatcatcaaggcccacgaggcgcacaagatgcagagcaccccgcaggcccggcgcaaggaatgggagatggctcgcttcggggaggcggtggtcgccaggccagggtccggcgatggagactcggaccagagcaggaaccggcaaggaacccccgtgccggcctcggggcaggcggccgcctacaagcagacgaaagcacagagggcgcggactatggctttgtacaaccccattcccgtccggcagaactgtttcaccgtcaacagatccctgttcatcttcggagaagataacattgtcaggaaatatgccaagaagctcatcgattggccgccatttgagtacatgatcctggccaccatcattgccaactgcatcgtcctggccctggagcagcatcttcctgaggatgacaagacccccatgtcccgaagactggagaagacagaaccttatttcattgggatcttttgctttgaagctgggatcaaaattgtggccctggggttcatcttccataagggctcttacctccgcaatggctggaatgtcatggacttcatcgtggtcctcagtggcatcctggccactgcaggaacccacttcaatactcacgtggacctgaggaccctccgggctgtgcgtgtcctgcggcctttgaagctcgtgtcagggatacctagcctgcagattgtgttgaagtccatcatgaaggccatggtacctcttctgcagattggccttctgctcttctttgccatcctgatgtttgctatcattggtttggagttctacagtggcaagttacatcgagcatgcttcatgaacaattcaggtattctagaaggatttgacccccctcacccatgtggtgtgcagggctgcccagctggttatgaatgcaaggactggatcggccccaatgatgggatcacccagtttgataacatcctttttgctgtgctgactgtcttccagtgcatcaccatggaagggtggaccactgtgctgtacaataccaatgatgccttaggagccacctggaattggctgtacttcatccccctcatcatcattggatccttctttgttctcaacctagtcctgggagtgctttccggggaatttgccaaagagagagagagagtggagaaccgaagggctttcatgaagctgcggcgccagcagcagattgagcgtgagctgaatggctaccgtgcctggatagacaaagcagaggaagtcatgctcgctgaagaaaataaaaatgctggaacatccgccttagaagtgcttcgaagggcaaccatcaagaggagccggacagaggccatgactcgagactccagtgatgagcactgtgttgatatctcctctgtgggcacacctctggcccgagccagtatcaaaagtgcaaaggtagacggggtctcttatttccggcacaaggaaaggcttctgcgcatctccattcgccacatggttaaatcccaggtgttttactggattgtgctgagccttgtggcactcaacactgcctgtgtggccattgtccatcacaaccagccccagtggctcacccacctcctctactatgcagaatttctgtttctgggactcttcctcttggagatgtccctgaagatgtatggcatggggcctcgcctttattttcactcttcattcaactgctttgattttggggtcacagtgggcagtatctttgaagtggtctgggcaatcttcagacctggtacgtcttttggaatcagtgtcttgcgagccctccggcttctaagaatatttaaaataaccaagtattgggcttccctacggaatttggtggtctccttgatgagctcaatgaagtctatcatcagtttgcttttcctcctcttcctcttcatcgttgtctttgctctcctaggaatgcagttatttggaggcaggtttaactttaatgatgggactccttcggcaaattttgataccttccctgcagccatcatgactgtgttccagatcctgacgggtgaggactggaatgaggtgatgtacaatgggatccgctcccagggtggggtcagctcaggcatgtggtctgccatctacttcattgtgctcaccttgtttggcaactacacgctactgaatgtgttcttggctatcgctgtggataatctcgccaacgcccaggaactgaccaaggatgaacaggaggaagaagaggccttcaaccagaaacatgcactgcagaaggccaaggaggtcagcccgatgtctgcacccaacatgccttcgatcgaaagagacagaaggagaagacaccacatgtcgatgtgggagccacgcagcagccacctgagggagcggaggcgccggcaccacatgtccgtgtgggagcagcgtaccagccagctgaggaagcacatgcagatgtccagccaggaggccctcaacagagaggaggcgccgaccatgaacccgctcaaccccctcaacccgctcagctccctcaacccgctcaatgcccaccccagcctttatcggcgacccagggccattgagggcctggccctgggcctggccctggagaagttcgaggaggagcgcatcagccgtggggggtccctcaagggggatggaggggaccgatccagtgccctggacaaccagaggacccctttgtccctgggccagcgggagccaccatggctggccaggccctgtcatggaaactgtgacccgactcagcaggaggcagggggaggagaggctgtggtgacctttgaggaccgggccaggcacaggcagagccaacggcgcagccggcatcgccgcgtcaggacagaaggcaaggagtcctcttcagcctcccggagcaggtctgccagccaggaacgcagtctggatgaagccatgcccactgaaggggagaaggaccatgagctcaggggcaaccatggtgccaaggagccaacgatccaagaagagagagcccaggatttaaggaggaccaacagtctgatggtgtccagaggctccgggctggcaggaggccttgatgaggctgacacccccctagtcctgccccatcctgagctggaagtggggaagcacgtggtgctgacggagcaggagccagaaggcagcagtgagcaggccctgctggggaatgtgcagctagacatgggccgggtcatcagccagagcgagcctgacctctcctgcatcacggccaacacggacaaggccaccaccgagagcaccagcgtcaccgtcgccatccccgacgtggaccccttggtggactcaaccgtggtgcacattagcaacaagacggatggggaagccagtcccttgaaggaggcagagatcagagaggatgaggaggaggtggagaagaagaagcagaagaaggagaagcgtgagacaggcaaagccatggtgccccacagctcaatgttcatcttcagcaccaccaacccgatccggagggcctgccactacatcgtgaacctgcgctactttgagatgtgcatcctcctggtgattgcagccagcagcatcgccctggcggcagaggaccccgtcctgaccaactcggagcgcaacaaagtcctgaggtattttgactatgtgttcacgggcgtgttcacctttgagatggttataaagatgatagaccaaggcttgatcctgcaggatgggtcctacttccgagacttgtggaacatcctggactttgtggtggtcgttggcgcattggtggcctttgctctggcgtaaaaccaacaaaggacgggacatcaagaccatcaagtctctgcgggtgctccgagttctaaggccactgaaaaccatcaagcgcttgcccaagctcaaggccgtcttcgactgcgtagtgacctccttgaagaatgtcttcaacatactcattgtgtacaagctcttcatgttcatctttgctgtcatcgcagttcagctcttcaagggaaagttcttttattgcacggacagttccaaggacacagagaaggagtgcataggcaactatgtagatcatgagaaaaacaagatggaggtgaagggccgggaatggaagcgccatgaattccactacgacaacattatctgggccctgctgaccctcttcaccgtctccacaggggaaggatggcctcaagttctgcagcactctgtagatgtgacagaggaagaccgaggcccaagccgcagcaaccgcatggagatgtctatcttttatgtagtctactttgtggtcttccccttcttctttgtcaatatctttgtggctctcatcatcatcaccttccaggagcaaggggataagatgatggaggagtgcagcctggagaagaatgagagggcgtgcatcgacttcgccatcagcgccaaacctctcacccgctacatgccgcagaacagacacaccttccagtaccgcgtgtggcactttgtggtgtctccgtcctttgagtacaccattatggccatgatcgccttgaatactgttgtgctgatgatgaagtattattctgctccctgtacctatgagctggccctgaagtacctgaatatcgccttcaccatggtgttttccctggaatgtgtcctgaaggtcatcgcttttggctttttgaactatttccgagacacctggaatatctttgacttcatcaccgtgattggcagtatcacagaaattatcctgacagacagcaagctggtgaacaccagtggcttcaatatgagctttctgaagctcttccgagctgcccgcctcataaagctcctgcgtcagggctataccatacgcattttgctgtggacctttgtgcagtcctttaaggccctcccttatgtctgccttttaattgccatgcttttcttcatttatgccatcattgggatgcaggtatttggaaacataaaattagacgaggagagtcacatcaaccggcacaacaacttccggagtttctttgggtccctaatgctactcttcaggagtgccacaggtgaggcctggcaggagattatgctgtcatgccttggggagaagggctgtgagcctgacaccaccgcaccatcagggcagaacgagaacgaacgctgcggcaccgatctggcctacgtgtactttgtctccttcatcttcttctgctccttcttgatgctcaacctgtttgtggccgtcatcatggacaactttgagtacctgactcgggactcctccatcctggggcctcaccacttggacgagtttgtccgcgtctgggcagaatatgaccgagcagcatgtggccgcatccattacactgagatgtatgaaatgctgactctcatgtcacctccgctaggcctcggcaagagatgtccctccaaagtggcatataagaggttggtcctgatgaacatgccagtagctgaggacatgacggtccacttcacctccacacttatggctctgatccggacagctctggacattaaaattgccaaaggtggtgcagacaggcagcagctagactcagagctacaaaaggagaccctagccatctggcctcacctatcccagaagatgctggatctgcttgtgcccatgcccaaagcctctgacctgactgtgggcaaaatctatgcagcaatgatgatcatggactactataagcagagtaaggtgaagaagcagaggcagcagctggaggaacagaaaaatgcccccatgttccagcgcatggagccttcatctctgcctcaggagatcattgctaatgccaaagccctgccttacctccagcaggaccccgtttcaggcctgagtggccggagtggatacccttcgatgagtccactctctccccaggatatattccagttggcttgtatggaccccgccgatgacggacagttccaagaacggcagtctctggtggtgacagaccctagctccatgagacgttcattttccactattcgggataagcgttcaaattcctcgtggttggaggaattctccatggagcgaagcagtgaaaatacctacaagtcccgtcgccggagttaccactcctccttgcggctgtcagcccaccgcctgaactctgattcaggccacaagtctgacactcaccgctcagggggcagggagcggggacgatcaaaagagcgaaagcatcttctctctcctgatgtctcccgctgcaattcagaagagcgagggacccaggctgactgggagtccccagagcgccgtcaatccaggtcacccagtgagggcaggtcacagacgcccaacagacagggcacaggttccctaagtgagagctccatcccctctgtctctgacaccagcaccccaagaagaagtcgtcggcagctcccacccgtcccgccaaagccccggcccctcctttcctacagctccctgattcgacacgcgggcagcatctctccacctgctgatggaagcgaggagggctccccgctgacctcccaagctctggagagcaacaatgcttgcctgaccgagtcttccaactctccgcacccccagcagagccaacatgcctccccacagcgctacatctccgagccctacttggccctgcacgaagactcccacgcctcagactgtggtgaggaggagacgctcactttcgaagcagccgtggctactagcctgggccgttccaacaccatcggctcagccccacccctgcggcatagctggcagatgcccaacgggcactatcggcggcggaggcgcggggggcctgggccaggcatgatgtgtggggctgtcaacaacctgctaagtgacacggaagaagatgacaaatgctagaggctgctcccccctccgatgcatgctcttctctcacatggagaaaaccaagacagaattgggaagccagtgcggcccgggggggaggaagagggaaaaggaagatggaaggacaccatgcattatcagagaagaggaagtaaaggacaatcagaacaccagtcaaacccaccaaattgctttattcccctttgcaagatgggcactgccatagttctgcctctttgctggggaaagaaaccaggaacgtggagggttattactgcgggagaagggacacgaggatggctttgcttccccttgccccttcccacttttctaaaagctgtggagggatctagctggcctatgtctacactcagtgccctgagaagcctggaagactttctggctcttaactggggagtagtggagaccataggagaggactctcctccctcaccagctcttacgcctcagccagcaccactgccaccagggcaactgcagcagcatctcatgcataaccctgtggcttgcttcccccagggcagcacaggctaagtcaggaacatcggatgccagggagggaggagaaagccgaagcgaaaggggtcagggtgctgaggcaacagcagcaagggctggtctggacaagaaaagccatagcccggcagcccctaccatgagggagacagagaaacagaactggtggtgctggggggtatagccccccatccttgaggcctgtcacccacacagtaggtgctgagagttaggacaggtcaggaagtcccccagggtccacaaaggtgcctgaggctctggtaagggtgaagataaaagtatttaacaaccgctatggcatcaatgtaagtggagtttggtcctagtgccggagcccatgctattccaggcattggctctttagatgccagtcatgggggaaccctgagggtgtgggtagagtagcaggggccacctaagagattaaaaacagagtctgttttccaaccagtgtggaagcaattaaatatacgtaacagtgctacggccacaccagcacctcctggctgaaggtcagcccacactctggtccatgaggcagcaaggccagtgctgtgccaagcccggtaaggccaagtgccgaggcccagccttccctgccactcctctgagagggcagaacacacatatccaagtaggctacccaccactgggtagggatttctgtaaagatgggaaaggctgatagattgaaataagcttctgtgaaagtctggatttactgaggacctcccctgaggagggaccgttgggaccgcagattctgcagctggtgtggggttcaggtcagtttgtcaggatgctttaaggtgattagtaaatatacctcagcttagacttgggctgctccttctagcaaagcaggctccagtggggcctcatcatacaggatgacaagactggggccctgttcaccttgaacatgcccctgggccaagatggggcttcacccctccccagagtaagagctggggctgacagtcccaccctgtcattcctaatagcccaaacgcagaagcactgagcaagagagccctttcttgccaagccagtgctcttttggtatatggcatacagctccattggaggggacacatcactggctttatctggtggaaatgtacctttcccttaagttcctccttagtgccatcacagcaggtgaatgggtgccctacggggccctccttcccccaccaggaacagatggaacctgccacccaggatcctgatctgccctgcactgagcactcagtggataaacactcctccagcccagacacactcctcctcttgggcaggagcaatccagagttgttatttttcttagaaggagcctcttttccctctattttttaaattgaaatataatagctgcatcagccctgaaaagccaaattcaaccacatggctggagaatcatttgtcatggccccgccttctcttctgatactaatggagcttcatgacccacggtcagcccccaaaccaaagttgtcccaacagaggaggccagtgaggcagagacagagctctcccactctcagaccctcttttgtcttcattttcctctcccacttagcacatgtgtgcttgagggtggctgggaatgtgatatacagcaccctgatcctaacaggtgtgattgttacgtaagacgctgatactgggccttgtattgcttttaaagtttcctctgctcagcatcatttcatgccaaagtgctgctatgggctgctttgtgtgcacaaaattgctttttccacctcggaaatgcagctttccctagggggaggcctacaacaggacgaccattctgagccagtgagtctattgcatggtgttttgagaaagggaattttagtgacaccttatgccatttcaagaggagaaatgcaggctggcagagcaatttccagaaatggaatttgcctgcaaatagtataaacaacactaaatttactgtgccaggaaatcttcctgaactccttgaactcatacacacaggtatttgagtcctgaataaagtgttggaaagcactgcagatgcggtcacctgactgaccacctgggttttctattaccagtgaatttcttttattcaccttcccttgaccaagaaattgggtttcttttccctcagcctgcacttactcttctattaagaccagaaaataaaataattttccgttgagtcac

SEQ ID NO: 1289 - protein, 1363 aa, Homo sapiens; identical to SEQ ID NO: 1281

SEQ ID NO: 1290 - DNA, 10102 bp, Homo sapiens
gatgcgtggactgagcccagaccgcaggctgcccgagcccgccccctgcccggctgcggggagccctgagcccaggtccgcgggccgccgccaacgccacgtcctggccctgccggaagaagaggcatggcggccccagcagtgcgctctgctcgaggccgacgcctcggacgaggtgggcatgctgccggcttccccgcgcgccgcctctggcttcgacaacttcttccaggtgcaggagggcgagggccagggctgggagggcgccatggcactggaggcgggctccagccctttcctgccggtgagccccgaggtcatgaagcggcggcgcgggggcctcatcgagcagcgcgacatcatcaaggcccacgaggcgcacaagatgcagagcaccccgcaggcccggcgcaaggaatgggagatggctcgcttcggggaggcggtggtcgccaggccagggtccggcgatggagactcggaccagagcaggaaccggcaaggaacccccgtgccggcctcggggcaggcggccgcctacaagcagacgaaagcacagagggcgcggactatggctttgtacaaccccattcccgtccggcagaactgtttcaccgtcaacagatccctgttcatcttcggagaagataacattgtcaggaaatatgccaagaagctcatcgattggccccatttgagtacatgatcctggccaccatcattgccaactgcatcgtcctggccctggagcagcatcttcctgaggatgacaagacccccatgtcccgaagactggagaagacagaaccttatttcattgggatcttttgctttgaagctgggatcaaaattgtggccctggggttcatcttccataagggctcttacctccgcaatggctggaatgtcatggacttcatcgtggtcctcagtggcatcctggccactgcaggaacccacttcaatactcacgtggacctgaggaccctccgggctgtgcgtgtcctgcggcctttgaagctcgtgtcagggatacctagcctgcagattgtgttgaagtccatcatgaaggccatggtacctcttctgcagattggccttctgctcttctttgccatcctgatgtttgctatcattggtttggagttctacagtggcaagttacatcgagcatgcttcatgaacaattcaggtattctagaaggatttgacccccctcacccatgtggtgtgcagggctgcccagctggttatgaatgcaaggactggatcggccccaatgatgggatcacccagtttgataacatcctttttgctgtgctgactgtcttccagtgcatcaccatggaagggtggaccactgtgctgtacaataccaatgatgccttaggagccacctggaattggctgtacttcatccccctcatcatcattggatccttctttgttctcaacctagtcctgggagtgctttccggggaatttgccaaagagagagagagagtggagaaccgaagggctttcatgaagctgcggcgccagcagcagattgagcgtgagctgaatggctaccgtgcctggatagacaaagcagaggaagtcatgctcgctgaagaaaataaaaatgctggaacatccgccttagaagtgcttcgaagggcaaccatcaagaggagccggacagaggccatgactcgagactccagtgatgagcactgtgttgatatctcctctgtgggcacacctctggcccgagccagtatcaaaagtgcaaaggtagacggggtctcttatttccggcacaaggaaaggcttctgcgcatctccattcgccacatggttaaatcccaggtgttttactggattgtgctgagccttgtggcactcaacactgcctgtgtggccattgtccatcacaaccagccccagtggctcacccacctcctctactatgcagaatttctgtttctgggactcttcctcttggagatgtccctgaagatgtatggcatggggcctcgcctttattttcactcttcattcaactgctttgattttggggtcacagtgggcagtatctttgaagtggtctgggcaatcttcagacctggtacgtcttttggaatcagtgtcttgcgagccctccggcttctaagaatatttaaaataaccaagtattgggcttccctacggaatttggtggtctccttgatgagctcaatgaagtctatcatcagtttgcttttcctcctcttcctcttcatcgttgtctttgctctcctaggaatgcagttatttggaggcaggtttaactttaatgatgggactccttcggcaaattttgataccttccctgcagccatcatgactgtgttccagatcctgacgggtgaggactggaatgaggtgatgtacaatgggatccgctcccagggtggggtcagctcaggcatgtggtctgccatctacttcattgtgctcaccttgtttggcaactacacgctactgaatgtgttcttggctatcgctgtggataatctcgccaacgcccaggaactgaccaaggatgaacaggaggaagaagaggccttcaaccagaaacatgcactgcagaaggccaaggaggtcagcccgatgtctgcacccaacatgccttcgatcgaaagagacagaaggagaagacaccacatgtcgatgtgggagccacgcagcagccacctgagggagcggaggcgccggcaccacatgtccgtgtgggagcagcgtaccagccagctgaggaagcacatgcagatgtccagccaggaggccctcaacagagaggaggcgccgaccatgaacccgctcaaccccctcaacccgctcagctccctcaacccgctcaatgcccaccccagcctttatcggcgacccagggccattgagggcctggccctgggcctggccctggagaagttcgaggaggagcgcatcagccgtggggggtccctcaagggggatggaggggaccgatccagtgccctggacaaccagaggacccctttgtccctgggccagcgggagccaccatggctggccaggccctgtcatggaaactgtgacccgactcagcaggaggcagggggaggagaggctgtggtgacctttgaggaccgggccaggcacaggcagagccaacggcgcagccggcatcgccgcgtcaggacagaaggcaaggagtcctcttcagcctcccggagcaggtctgccagccaggaacgcagtctggatgaagccatgcccactgaaggggagaaggaccatgagctcaggggcaaccatggtgccaaggagccaacgatccaagaagagagagcccaggatttaaggaggaccaacagtctgatggtgtccagaggctccgggctggcaggaggccttgatgaggctgacacccccctagtcctgccccatcctgagctggaagtggggaagcacgtggtgctgacggagcaggagccagaaggcagcagtgagcaggccctgctggggaatgtgcagctagacatgggccgggtcatcagccagagcgagcctgacctctcctgcatcacggccaacacggacaaggccaccaccgagagcaccagcgtcaccgtcgccatccccgacgtggaccccttggtggactcaaccgtggtgcacattagcaacaagacggatggggaagccagtcccttgaaggaggcagagatcagagaggatgaggaggaggtggagaagaagaagcagaagaaggagaagcgtgagacaggcaaagccatggtgccccacagctcaatgttcatcttcagcaccaccaacccgatccggagggcctgccactacatcgtgaacctgcgctactttgagatgtgcatcctcctggtgattgcagccagcagcatcgccctggcggcagaggaccccgtcctgaccaactcggagcgcaacaaagtcctgaggtattttgactatgtgttcacgggcgtgttcacctttgagatggttataaagatgatagaccaaggcttgatcctgcaggatgggtcctacttccgagacttgtggaacatcctggactttgtggtggtcgttggcgcattggtggcctttgctctggcgtaaaaccaacaaaggacgggacatcaagaccatcaagtctctgcgggtgctccgagttctaaggccactgaaaaccatcaagcgcttgcccaagctcaaggccgtcttcgactgcgtagtgacctccttgaagaatgtcttcaacatactcattgtgtacaagctcttcatgttcatctttgctgtcatcgcagttcagctcttcaagggaaagttcttttattgcacggacagttccaaggacacagagaaggagtgcataggcaactatgtagatcatgagaaaaacaagatggaggtgaagggccgggaatggaagcgccatgaattccactacgacaacattatctgggccctgctgaccctcttcaccgtctccacaggggaaggatggcctcaagttctgcagcactctgtagatgtgacagaggaagaccgaggcccaagccgcagcaaccgcatggagatgtctatcttttatgtagtctactttgtggtcttccccttcttctttgtcaatatctttgtggctctcatcatcatcaccttccaggagcaaggggataagatgatggaggagtgcagcctggagaagaatgagagggcgtgcatcgacttcgccatcagcgccaaacctctcacccgctacatgccgcagaacagacacaccttccagtaccgcgtgtggcactttgtggtgtctccgtcctttgagtacaccattatggccatgatcgccttgaatactgttgtgctgatgatgaagtattattctgctccctgtacctatgagctggccctgaagtacctgaatatcgccttcaccatggtgttttccctggaatgtgtcctgaaggtcatcgcttttggctttttgaactatttccgagacacctggaatatctttgacttcatcaccgtgattggcagtatcacagaaattatcctgacagacagcaagctggtgaacaccagtggcttcaatatgagctttctgaagctcttccgagctgcccgcctcataaagctcctgcgtcagggctataccatacgcattttgctgtggacctttgtgcagtcctttaaggccctcccttatgtctgccttttaattgccatgcttttcttcatttatgccatcattgggatgcaggtatttggaaacataaaattagacgaggagagtcacatcaaccggcacaacaacttccggagtttctttgggtccctaatgctactcttcaggagtgccacaggtgaggcctggcaggagattatgctgtcatgccttggggagaagggctgtgagcctgacaccaccgcaccatcagggcagaacgagaacgaacgctgcggcaccgatctggcctacgtgtactttgtctccttcatcttcttctgctccttcttgatgctcaacctgtttgtggccgtcatcatggacaactttgagtacctgactcgggactcctccatcctggggcctcaccacttggacgagtttgtccgcgtctgggcagaatatgaccgagcagcatgtggccgcatccattacactgagatgtatgaaatgctgactctcatgtcacctccgctaggcctcggcaagagatgtccctccaaagtggcatataagaggttggtcctgatgaacatgccagtagctgaggacatgacggtccacttcacctccacacttatggctctgatccggacagctctggacattaaaattgccaaaggtggtgcagacaggcagcagctagactcagagctacaaaaggagaccctagccatctggcctcacctatcccagaagatgctggatctgcttgtgcccatgcccaaagcctctgacctgactgtgggcaaaatctatgcagcaatgatgatcatggactactataagcagagtaaggtgaagaagcagaggcagcagctggaggaacagaaaaatgcccccatgttccagcgcatggagccttcatctctgcctcaggagatcattgctaatgccaaagccctgccttacctccagcaggaccccgtttcaggcctgagtggccggagtggatacccttcgatgagtccactctctccccaggatatattccagttggcttgtatggaccccgccgatgacggacagttccaagaacggcagtctctggagccagaggttagtgaattaaaaagcgtgcagccctctaaccatggcatctaccttccttcggacacccaggagcatgcgggatctgggagggcatcttctatgccacgtctgactgtggatccccaggtggtgacagaccctagctccatgagacgttcattttccactattcgggataagcgttcaaattcctcgtggttggaggaattctccatggagcgaagcagtgaaaatacctacaagtcccgtcgccggagttaccactcctccttgcggctgtcagcccaccgcctgaactctgattcaggccacaagtctgacactcaccgctcagggggcagggagcggggacgatcaaaagagcgaaagcatcttctctctcctgatgtctcccgctgcaattcagaagagcgagggacccaggctgactgggagtccccagagcgccgtcaatccaggtcacccagtgagggcaggtcacagacgcccaacagacagggcacaggttccctaagtgagagctccatcccctctgtctctgacaccagcaccccaagaagaagtcgtcggcagctcccacccgtcccgccaaagccccggcccctcctttcctacagctccctgattcgacacgcgggcagcatctctccacctgctgatggaagcgaggagggctccccgctgacctcccaagctctggagagcaacaatgcttgcctgaccgagtcttccaactctccgcacccccagcagagccaacatgcctccccacagcgctacatctccgagccctacttggccctgcacgaagactcccacgcctcagactgtggtgaggaggagacgctcactttcgaagcagccgtggctactagcctgggccgttccaacaccatcggctcagccccacccctgcggcatagctggcagatgcccaacgggcactatcggcggcggaggcgcggggggcctgggccaggcatgatgtgtggggctgtcaacaacctgctaagtgacacggaagaagatgacaaatgctagaggctgctcccccctccgatgcatgctcttctctcacatggagaaaaccaagacagaattgggaagccagtgcggcccgggggggaggaagagggaaaaggaagatggaaggacaccatgcattatcagagaagaggaagtaaaggacaatcagaacaccagtcaaacccaccaaattgctttattcccctttgcaagatgggcactgccatagttctgcctctttgctggggaaagaaaccaggaacgtggagggttattactgcgggagaagggacacgaggatggctttgcttccccttgccccttcccacttttctaaaagctgtggagggatctagctggcctatgtctacactcagtgccctgagaagcctggaagactttctggctcttaactggggagtagtggagaccataggagaggactctcctccctcaccagctcttacgcctcagccagcaccactgccaccagggcaactgcagcagcatctcatgcataaccctgtggcttgcttcccccagggcagcacaggctaagtcaggaacatcggatgccagggagggaggagaaagccgaagcgaaaggggtcagggtgctgaggcaacagcagcaagggctggtctggacaagaaaagccatagcccggcagcccctaccatgagggagacagagaaacagaactggtggtgctggggggtatagccccccatccttgaggcctgtcacccacacagtaggtgctgagagttaggacaggtcaggaagtcccccagggtccacaaaggtgcctgaggctctggtaagggtgaagataaaagtatttaacaaccgctatggcatcaatgtaagtggagtttggtcctagtgccggagcccatgctattccaggcattggctctttagatgccagtcatgggggaaccctgagggtgtgggtagagtagcaggggccacctaagagattaaaaacagagtctgttttccaaccagtgtggaagcaattaaatatacgtaacagtgctacggccacaccagcacctcctggctgaaggtcagcccacactctggtccatgaggcagcaaggccagtgctgtgccaagcccggtaaggccaagtgccgaggcccagccttccctgccactcctctgagagggcagaacacacatatccaagtaggctacccaccactgggtagggatttctgtaaagatgggaaaggctgatagattgaaataagcttctgtgaaagtctggatttactgaggacctcccctgaggagggaccgttgggaccgcagattctgcagctggtgtggggttcaggtcagtttgtcaggatgctttaaggtgattagtaaatatacctcagcttagacttgggctgctccttctagcaaagcaggctccagtggggcctcatcatacaggatgacaagactggggccctgttcaccttgaacatgcccctgggccaagatggggcttcacccctccccagagtaagagctggggctgacagtcccaccctgtcattcctaatagcccaaacgcagaagcactgagcaagagagccctttcttgccaagccagtgctcttttggtatatggcatacagctccattggaggggacacatcactggctttatctggtggaaatgtacctttcccttaagttcctccttagtgccatcacagcaggtgaatgggtgccctacggggccctccttcccccaccaggaacagatggaacctgccacccaggatcctgatctgccctgcactgagcactcagtggataaacactcctccagcccagacacactcctcctcttgggcaggagcaatccagagttgttatttttcttagaaggagcctcttttccctctattttttaaattgaaatataatagctgcatcagccctgaaaagccaaattcaaccacatggctggagaatcatttgtcatggccccgccttctcttctgatactaatggagcttcatgacccacggtcagcccccaaaccaaagttgtcccaacagaggaggccagtgaggcagagacagagctctcccactctcagaccctcttttgtcttcattttcctctcccacttagcacatgtgtgcttgagggtggctgggaatgtgatatacagcaccctgatcctaacaggtgtgattgttacgtaagacgctgatactgggccttgtattgcttttaaagtttcctctgctcagcatcatttcatgccaaagtgctgctatgggctgctttgtgtgcacaaaattgctttttccacctcggaaatgcagctttccctagggggaggcctacaacaggacgaccattctgagccagtgagtctattgcatggtgttttgagaaagggaattttagtgacaccttatgccatttcaagaggagaaatgcaggctggcagagcaatttccagaaatggaatttgcctgcaaatagtataaacaacactaaatttactgtgccaggaaatcttcctgaactccttgaactcatacacacaggtatttgagtcctgaataaagtgttggaaagcactgcagatgcggtcacctgactgaccacctgggttttctattaccagtgaatttcttttattcaccttcccttgaccaagaaattgggtttcttttccctcagcctgcacttactcttctattaagaccagaaaataaaataattttccgttgagtcac

SEQ ID NO: 1291 - protein, 1131 aa, Homo sapiens
MILATIIANCIVLALEQHLPEDDKTPMSRRLEKTEPYFIGIFCFEAGIKIVGFIFHKGSYLRNGWNVMDFIVVLSGILATAGTHFNTHVDLRTLRAVRVLRPLKLVSGIPSLQIVLKSIMKAMVPLLQIGLLLFFAILMFAIIGLEFYSGKLHRACFMNNSGIGFDPPHPCGVQGCPAGYECKDWIGPNDGITQFDNILFAVLTVFQCITMEGWTTVLYNTNDALGATWNWLYFIPLIIIGSFFVLNLVLGVLSGEFAKERERVENRRAFMKLRRQQQIERELNGYRAWIDKAEEVMLAEENKNAGTSALEVLRRATIKRSRTEAMTRDSSDEHCVDISSVGTPLARASIKSAKVDGVSYFRHKERLLRISIRHMVKSQVFYWIVLSLVNTACVAIVHHNQPQWLTHLLYYAEFLFLGLFLLEMSLKMYGMGPRLYFHSSFNCFDFGVTVGSIFEVVWAIFRPGTSFGISVLRALRLLRIFKITKYWASLRNLVVSLMSSMKSIISLLFLLFLFIVVFALLGMQLFGGRFNFNDGTPSANFDTFPAAIMTVFQILTGEDWNEVMYNGIRSQGGVSSGMWSAIYFIVLTLFGNYTLLNVFLAIAVDNLANAQELTKDEQEEEEAFNQKHALQKAKEVSPMSAPNMPSIERDRRRRHHMSMWEPRSSHLRERRRRHHMSVWEQRTSQLRKHMQMSSQEALNREEAPTMNPLNPLNPLSSLNPLNAHPSLYRRPRAIEGLALGLALEKFEEERISRGGSLKGDGGDRSSALDNQRTPLSLGQREPPWLARPCHGNCDPTQQEAGGGEAVVTFEDRARHRQSQRRSRHRRVRTEGKESSSASRSRSASQERSLDEAMPTEGEKDHELRGNHGAKEPTIQEERAQDLRRTNSLMVSRGSGLAGGLDEADTPLVLPHPELEVGKHVVLTEQEPEGSSEQALLGNVQLDMGRVISQSEPDLSCITANTDKATTESTSVTVAIPDVDPLVDSTVVHNKTDGEDLKEAEIREDEEEVEKKKQKKEKRETGKAMVPHSSMFIFSTTNPIRRACHYIVNLRYFEMCILLVIAASSIAAEDPVLTNSNKVLRYFDYVFTGVFTFEMVIKMIDQGLILQDGSYFRDLWNILDFVVVVGALVAFA

SEQ ID NO: 1292 - DNA, 153740 bp, Mus musculus
  misc_feature (1)...(153740): n = A,T,C or G
gtttagagactggtagaggacatgcctacttacatattcaacatgaagtggagggaggaagagaagatggaacctgcctgtcatagggagaaccagagcaaatgtgcctctgtcaggggttactggggaaagaaatgcatcctgggagttactacccctgacctgtaagaacaatcctcctttttctctttttgggtcttttttttcagagacacttgagttgtgtaattgttttggaaaatatcttctagtacttttttgtgttggggtggttaatgcttgagaaatatcagctggcctttggtataatctgtggcttagttagggtttctattgttgtgacaagaccacgtcaaccaaaagaaagttggggaggaaagggttaatatggctcacacatccataccacagttcatcatcaaaggcagtgaggacaggaacttaagcagggcaggaacctggagtcaggagctgatgcagaggccatggaggggtgatcctaactggcttgctgcaatcccatggcttgcccagcctgccttcttattgaacccaggcaggaccaccagcccagggatggcaccacccacaatgggttgggtcttcctcccttgatcactaattgaaaaaatgccttacagctggatctcatgggggcttttcatctctgggatgactgtagcttgtctcaagttgacacacaaaaccagcccgttcaatctgatccgttggagcaagttagagctccctgggttggcttatggcttatgaacactctgtgagacgatctggtgtctgaaacactgtgttagtcatcagaaggcttggtgagcatagaaaaacggtctgcaaggaaggtctgatatggtggaaatctgggtaagggctggagagggcatgctcaagtggcccaaaagagcagtagtaaattggtaattcgcctattgtcccaggtttaaatctgccctctgtactctgttctgtgatgacagagctgggattttgcaaaccagacccaggggttcccctttatgggattcctcttaggttttgactgcaggagacaagaggcgcagtcaaaaggcagaacaagacaaagtcatttttctgttccttgatattaacgtcactgctgcagatatggcaccttcccccagcggtggcatttcacaccacggtgccagtctgctccagctcctttcctatttgcagaacctcaatgtgccaactcatattgtgccagaagaaaccccgtgtgaactgcctcaagtgtcaagctctaatttcctgatgtcccctccccgcagcacttcagtctgatctgtccacttttgttctccgaggcatagggtggtaactactgtttgaagtttgtctttctcccagttagccttccaagagccgtgtgaccaattcttcataatgacgctcttcaatttctgttgaaatattcagggtggggcgggtggtgtctgctttcttctgactaattttttttgtgtgtgtgtgcaatgtgtatgggtgttttgtctgtacgtatgtgtatgtagcatttgcttgatgcctgctggccacagaggtcacaagagggccttggataatctagaactggagttacagatgtttgtgaagtacgggaatcaaacctgggtcctctggaagagcaggaagtgcttttaaccatggagccagctctctgccccctcccccactgacaacatttctttaaaatatttgttatttttattatttctgcatgtgtgtgtgttatatctctctctgtgtctctctgtgctctctctgtctctgtctctctctctctctctctctgtgtgtgtgtgtgtgtgtgtgtgtgtgtgtgtttgagatatgtgtgctggtgcctatggaggccagaagagggcattggagcccctggagctgggacacccaacatgggttctggggatgaacatttgtcccctgagtgagtagcaatcacccttaacttcagatgtgtctctttatgcattctgacttatccagaagtagagtgaacttaaaagaaaaacagtcaggagtctaggcaacaggtagccaaagacttaccaggaacagcagtatgagtcttctagctatcttccttaactgggatagtgacatacatctaccttccattcttgttgggatgttaggaaacacaccagagtagagatttagaaggacgctggttgcacattacctaagtttacttgtcacagttttagtcgtaagagggagcatactgatgttacaaggatgcagtgtgttgtatgggtcctggggcagggattgctgctctatcttgggaggagtgtaggactgggaactggaagaccaccaggatctttactggtatcattttcttgcaggttactgcattccttctcctgggaattttcttcctctgtctgatcccataggctatatgatgcagagaacatttctgcctatggctttagggttgatatctccttgaaaatgagaactgggtagaatttttctctgcttcattttcaaattttttgtaagacagcatccaaagaacagcttggtttagatttctattcacagtcttgtcagctatgaccctggaagcagagattccctaatgaaagcatagattcaggtggcccgccctacgtgagagcgagaacagcataattgtgcactgagaagacattcaggcctcggcctgtcaggcttggtcttagtaatggcgatgatgaagcttggagttggagtgaagaccagcttttggtatcagtgtttgtttcagattgattctataaagatatgggggagtggtgagaaccgagccttcagataaggatccaggacctgcagggctgaagactcagatccaggacctgcagggctgaagactcagaacaggacctacccgtcatctgccttagatccaggagcatagcctggatttctcatgaaaaatttcactctagctctaatcttcaatcaattgaagaaataaaggttgcccattcactcagcaacaatgtgagcactcctatctctccagtgctgctgacacgccatgggaagactttctccagactccattcctcttatattagtcaggcttctcctagagaaagagaatggacataatgactctgaattaaatgaggattagttagagtgacttacaggctgtggcccagttggtctaacaatggctctctctccatggaaaggtcaagagtccactagttgctcagtccacaaggctgagtgctcgactgctctttggtcattgttggaacaccaaagaagtaggttctaataacagtgaaggaatgcctcggtagcaggattggggaagttgccaatgaaactgggggcaagtaggcaaacagcaaactcttccttcttccttgtccctgggtagtctgccatcagaaggtgtggcccagatttaggatgggtcatctgacctctaataatacaatcacaggagtgcccaactctgttggttttagatgattccagatgcagtcaagttgacaacaagatgtcccaggatgcagtcaagttgacaacaagatgtcccaagcccctgcccaagtcactcccacaattcctcactggtccagggatactttgctgattttcctatttattttgttagcacaaatctcttcagtggttcaaaagaaagcattttgtgtaactggacaaaatgtcttggacatgaagggccttggagaataaagactccatctgtcagtgtaacatctgagccttccttgaagcacaggaccaggaactgtctgggaatttgagtgctactgaccattccacactggacatgcacacagaaaattaacacagatgctataaattcttttctgctgtgaagaacgttgaatattagaagcaaggaggtggtgttctggtggtaactctgggcaacgtgatggactgacctgcaaagaggaagatggtatgaaatccttgaattgagattctgtagaggacaacatgatttttttatacttatttagaagctccccaacccaagtgacaatcacagatactatccctgcatgcatcccagtgccccgtggacatagatgaggagagtcatgcaaatctctaaaggtaagcctcaaaaagtaaaaataatttgaccttatgaaattggatccaagtagatcagtggagactgttgttcctcccaacacactggaaaaaccccatccaggaagagtggcagctgagggtcttcacatttcacaaagagggttatggttgtgtatgcaacaagtacaccaaactgtgacagagtcaggaagacactgctgttcctcagactctattttgctgtgacagatacatgtgtgagatgctgggagataggtgttgctgagtgcaggataaagtacaaatgtcaggagggaagggaatcaggatacatacaaagctgaccatgagtgttgataaacagccaagttgttgaaaatgttgttccctgaagacgttttaaaataagctggtctcttagccaagggtagtgcagcgctccagccttatagccagaagaaaggtcatagtctttaggataatgctgcaaagcaaactgttccagcactttttgtaaccatcattttgttcaggagcccacagccaagttaaggttccgtgtttcttggttttgttttatttcacccttcatctctggaggtctgctaggcgagaaaagacaaagcagaaagcaaggaaagcaactggtgtggtcactagaatcagatgactgtccagtctagaggctctgggaaggtttgccattgtcacccaatgggcagagtgggtattgaacagtgtaagaactgtgacataagctgagatgctgccattccctggacaaaatcttcaaatgagctactgcttctcaggcccccctttccttatgtgaaacatgaggatattaatatctgcattgagtgaatattggggctgtctgaggactggatgaagtcatgtctgcgaaggcactctttaaactgtcatatactatatgtggcattgttctaaacgaaggctgttattagacgcgttctcacgcccggccaggaagaacgcaacagaccagaatcttctgcggcaaaactttattgcttacatcttcaggagcaggagtgtaagaagcaagagagcgagaaaacgaaaacccgtccctattaaggagaattctccttcgcctaggacgtgtcactccctgattggctgcagcccatcggccgagttgacgtcacggggaaggcagagcacatggagtggagaaccaccctcggcacatgcgcagattatttgtttaccacttagaacacagctgtcagcgccatcttgtaacggcgaatgtgggcgcggctcccaacatctccccctttccttttaataagagcaaataggccacccatattaatgagagtggagatagaggtcaaatccccagtgtgtaggtaaaggagccatgtacaggattagctcttaggctcacaggcttttacccagagcaaccctgacctgctcccgtgtcgttttgcctggagagaaggacacttggacactcaaccttcttgaaagatgacatgtctccctagaataggctcatatatgccgcagagcctttctactgcagtgcttagccgtgcaactctctcgggctgctgaagcacactcactctatcccgtgcaatgagactagcctcatgggatataagagctgagtggccagcgacctattgcctaagcatagataaccatatatcagggggagcaccatgttctagagctgcaagcgcctgggcaataaccaccttgtctctcctagtttaggccttaagcttacagaccaatcaaagaagcaacactaatccacagcaaagtgtatctccaaataatatcagtcccacccattctttaaagaagggaaatgttgaggagatccaattgggtaatcctttggtcagggacaggtccaagtgcgtggagttgacctgaagtctcaattcccgaaggatctgttcaaattcagccgtccaattctgtaacatatactgaaaaagactttttgacaaattagctgccctagtaaatttaacatactgaatggaaataacacacaatcccggaaacttttgttcacatccctgctgagttatttgtcataatacatctagttgtatctgaacaagatctatgagttgattaaccagcatgagatctccctgtatcttgacattagctgaggcctgtttatctatgactgtagtcactgaggctgacaaagtgttaatggtgtcagttgtctggacctgtccagacagagccaaggctgtctgaatcaaggctaaacccagttcctagttagtgtaaaaaggcaggagaatacttgagcattatacatcaccgtcattgggagtggaaatgtcgacattatcccccaacgctgctctctctttattattgacgccctggacatcaccaagacgagggacatcagtannnnnnnnnnnnnnnnnnnnnnnnnnnnnnnnnnnnnnnnnnnnnnnnnnnnnnnnnnnnnnnnnnnnnnnnnnnnnnnnnnnnnnnnnnnnnnnnnnnnnnnnnnnnnnnnnnnnnnnnnnnnnnnnnnnnnnnnnnnnnnnnnnnnnnnnnnnnnnnnnnnnnnnnnnnnnnnnnnnnnnnnnnnnnnnnnnnnnnnnnnnnnnnnnnnnnnnnnnnnnnnnnnnnnnnnnnnnnnnnnnnnnnnnnnnnnnnnnnnnnnnnnnnnnnnnnnnnnnnnnnnnnnnnnnnnnnnnnnnnnnnnnnnnnnnnnnnnnnnnnnnnnnnnnnnnnnnnnnnnnnnnnnnnnnnnnnnnnnnnnnnnnnnnnnnnnnnnnnnnnnnnnnnnnnnnnnnnnnnnnnnnnnnnnnnnnnnnnnnnnnnnnnnnnnnnnnnnnnnnnnnnnnnnnnnnnnnnnnnnnnnnnnnnnnnnnnnnnnnnnnnnnnnnnnnnnnnnnnnnnnnnnnnnnnnnnnnnnnnnnnnnnnnnnnnnnnnnnnnnnnnnnnnnnnnnnnnnnnnnnnnnnnnnnnnnnnnnnnnnnnnnnnnnnnnnnnnnnnnnnnnnnnnnnnnnnnnnnnnnnnnnnnnnnnnnnnnnnnnnnnnnnnnnnnnnnnnnnnnnnnnnnnnnnnnnnnnnnnnnnnnnnnnnnnnnnnnnnnnnnnnnnnnnnnnnnnnnnnnnnnnnnnnnnnnnnnnnnnnnnnnnnnnnnnnnnnnnnnnnnnnnnnnnnnnnnnnnnnnnnnnnnnnnnnnnnnnnnnnnnnnnnnnnnnnnnnnnnnnnnnnnnnnnnnnnnnnnnnnnnnnnnnnnnnnnnnnnnnnnnnnnnnnnnnnnnnnnnnnnnnnnnnnnnnnnnnnnnnnnnnnnnnnnnnnnnnnnnnnnnnnnnnnnnnnnnnnnnnnnnnnnnnnnnnnnnnnnnnnnnnnnnnnnnnnnnnnnnnnnnnnnnnnnnnnnnnnnnnnnnnnnnnnnnnnnnnnnnnnnnnnnnnnnnnnnnnnnnnnnnnnnnnnnnnnnnnnnnnnnnnnnnnnnnnnnnnnnnnnnnnnnnnnnnnnnnnnnnnnnnnnnnnnnnnnnnnnnnnnnnnnnnnnnnnnnnnnnnnnnnnnnnnnnnnnnnnnnnnnnnnnnnnnnnnnnnnnnnnnnnnnnnnnnnnnnnnnnnnnnnnnnnnnnnnnnnnnnnnnnnnnnnnnnnnnnnnnnnnnnnnnnnnnnnnnnnnnnnnnnnnnnnnnnnnnnnnnnnnnnnnnnnnnnnnnnnnnnnnnnnnnnnnnnnnnnnnnnnnnnnnnnnnnnnnnnnnnnnnnnnnnnnnnnnnnnnnnnnnnnnnnnnnnnnnnnnnnnnnnnnnnnnnnnnnnnnnnnnnnnnnnnnnnnnnnnnnnnnnnnnnnnnnnnnnnnnnnnnnnnnnnnnnnnnnnnnnnnnnnnnnnnnnnnnnnnnnnnnnnnnnnnnnnnnnnnnnnnnnnnnnnnnnnnnnnnnnnnnnnnnnnnnnnnnnnnnnnnnnnnnnnnnnnnnnnnnnnnnnnnnnnnnnnnnnnnnnnnnnnnnnnnnnnnnnnnnnnnnnnnnnnnnnnnnnnnnnnnnnnnnnnnnnnnnnnnnnnnnnnnnnnnnnnnnnnnnnnnnnnnnnnnnnnnnnnnnnnnnnnnnnnnnnnnnnnnnnnnnnnnnnnnnnnnnnnnnnnnnnnnnnnnnnnnnnnnnnnnnnnnnnnnnnnnnnnnnnnnnnnnnnnnnnnnnnnnnnnnnnnnnnnnnnnnnnnnnnnnnnnnnnnnnnnnnnnnnnnnnnnnnnnnnnnnnnnnnnnnnnnnnnnnnnnnnnnnnnnnnnnnnnnnnnnnnnnnnnnnnnnnnnnnnnnnnnnnnnnnnnnnnnnnnnnnnnnnnnnnnnnnnnnnnnnnnnnnnnnnnnnnnnnnnnnnnnnnnnnnnnnnnnnnnnnnnnnnnnnnnnnnnnnnnnnnnnnnnnnnnnnnnnnnnnnnnnnnnnnnnnnnnnnnnnnnnnnnnnnnnnnnnnnnnnnnnnnnnnnnnnnnnnnnnnnnnnnnnnnnnnnnnnnnnnnnnnnnnnnnnnnnnnnnnnnnnnnnnnnnnnnnnnnnnnnnnnnnnnnnnnnnnnnnnnnnnnnnnnnnnnnnnnnnnnnnnnnnnnnnnnnnnnnnnnnnnnnnnnnnnnnnnnnnnnnnnnnnnnnnnnnnnnnnnnnnnnnnnnnnnnnnnnnnnnnnnnnnnnnnnnnnnnnnnnnnnnnnnnnnnnnnnnnnnnnnnnnnnnnnnnnnnnnnnnnnnnnnnnnnnnnnnnnnnnnnnnnnnnnnnnnnnnnnnnnnnnnnnnnnnnnnnnnnnnnnnnnnnnnnnnnnnnnnnnnnnnnnnnnnnnnnnnnnnnnnnnnnnnnnnnnnnnnnnnnnnnnnnnnnnnnnnnnnnnnnnnnnnnnnnnnnnnnnnnnnnnnnnnnnnnnnnnnnnnnnnnnnnnnnnnnnnnnnnnnnnnnnnnnnnnnnnnnnnnnnnnnnnnnnnnnnnnnnnnnnnnnnnnnnnnnnnnnnnnnnnnnnnnnnnnnnnnnnnnnnnnnnnnnnnnnnnnnnnnnnnnnnnnnnnnnnnnnnnnnnnnnnnnnnnnnnnnnnnnnnnnnnnnnnnnnnnnnnntctctctctctctctctctctctctctctctctctctctctctctctctcgcagtgagggaaagagagtaaaacaaactttctggaggagggctcagcgctcagctctcatggccaaaatacgaaagatcagctccatgtgtgtgactcaactgtccaggaaatgagaatcgcaagagactccaaacctgacgttgtgcttatagcttcagctcgagtaagaaaaatgaggtggggggagtaccccatgacgggactcgagtctcagatgcaggagaaaggcaccgagaggcatggtggcaagaaggcaaaggagagctgcagctttaagtcctcctatggttatacatatttttcttctatgaatgggttttgctgtaaattatagctttgctcgtggtcccttgggtcaaaagaaatagtctccaaactgcaaacagctctgattggtgacttgccttcttccctccccaacccccttcctaattgaaagcaaatgtgcaatatattggatgctgggatccttggcgcaggcccaggaatcctcagaatgtgaggtctctctcaaaggcatcttgcatcagcctgtggatgtatgcctaccacggggctccttcaccggcaaagtggaaaaagaaggggttcccgagaaagtcttctgggttgggggaacctattggattataaccgtttccttctcttcaaacctgggcgtccctggactggaagtaagtgatgtggctccttcctccctgcccccaccttcgttttcttttctaaaaacgaaagctctaagtggacttctcttggtgtgtcaggaaaagttcggaaaagcggcagagggcagagtttgaatcagggcggaagggcagggagctgggctcttcaagactcaggaccgaggcagatctcatgttttggggtctggatttgtgtcagcgagggaagaacaggcgccaataaccaaagaaggctgaagcgaggtacaggactccatagcagctgcaagtacaataaacagttttagcagagctggaaatgttggcaggcaagacaggccgatcgcagagtcgggctgctggagagaggtgagccaggagctgtgttttcaggctttgagcactggggtttgagggacctgagttttggtgagaacgtggcctagtaccttttgtgatttaattgtgggaagggagactgtggctgcgggcttgggatgaggggtggcttcacctttggtcttgggtaaggttgggcgggaaggccagctgcctggagggtttgcagtgggtgacacgaagcaatcacttcccagactctccttctccccagcgttgggtgctgttctttttgttgtcagagggccggtctgttagcagttgggacccagtgttctggcctacccatctaagggacagagttctctgcaagtggcagacatacttaggtcagccatttgaggagagtttggagaactcaaggcagcggcgcctttagcaccatcttaactgttcagctttccgcatccttccctagtggcaattggagcgtggaaaggggggtctttgcaattgctgcggtctcttctgacccgttcattacacagatttcagacatgttagcacggccctagtgcctgttgcactccacgcttatgccttcagacttatttttaagatttaggagagacaatggggcaagtcttctccgggcgtttatcagctataaaaagatggtagaagtggttcatcagctggtggtccttggtgtgtgtgtcaatgttggtgtgcacgtgtgcacgtgtgtgtgtgcacatgtgtgtgcacaaatgaaacaaaaaaaattaacatttgagtccttgctctgaccagcctccagatattttcctgttatttgattcacggttctgtaaggcaccattcctgttttacaggaaagggttttaagacagagaagtgaaatgaattgttcgaggaagcacaactaatgtgcttaaaagttgttacatccggagtctggtcctccgactcaccgtgggcagttctcccgtctcccactccacacttggacttgcttacttctggagtcaaacttcatgtttcaccgggtgaccaggaggtacccatgccaggctaagggaacagtttggatttgcactcagagaaacacttgcccgggtatcagatggaggttaaattccaggtactggatgtctgtttagctttgtgatgcagagagcctgggacttttagagttggtagacccaggttaggttctgtctctatctttgactgcttcctgcacttcagcctctgtgttcactacatggaaatgagaatactcttgagttttactgttttagactcggacatgaatgcattctggaggctatgaagggcttcattaggtcagctcttatggttgtaatgaaatgtgaccgaatgtactggaaattagcttttgtcaggctgggtctggcagttggtgcagacccgtaagactgtgccaaactctgaaatggggagtggctctatcttcactcctatctctttgtgtgtgcatacctgcacacgtgcgtgtacaggtgcacatgtgcaggtatgtttgtgtatgtggaggcctcggtgataggatccctcagtgccctagtgctcactcagtaggctgggctggctggcctctgggctccaggaatcctcctgtctctgcctctgtgcatttcaggagactaaactcaggttctcatgcttgtgtgatttgtgtgataagtactttacacactgagatatctctccaggtcttcatgcctatcttctaacgggaaccatcctgcctcatggggaaatactcctggattttctctctaaaaattcccttgtaggtctggtttgtgtatggtttcttatctaaaatggagtgggttgaaggtcaataggttactcgaagcatctctggatctgcattgtctctgaatgagcaaggtttaatctggaggagcttcgtggccagctgaggacaggtcctgagcccagggacatcttatcactggcaagtgcatctcccttcatcttcctgttctgagcctgcagtcagaaaagttgcagttctcctgaagtaagagtctaaggctagcctgtgggggcctccacgtctgtttctgcttaagatccagttgcttgtagaagtgtcgcgggggcaaagcagaagcgctatccagagaaagtcctccattgtctcgcctccaaaaccttcccatataacttccttccaggcttacacagtcacttccgggaatggaagccatttgggtctgtattccccatagggaattttgttctaacctctccacgtgatagcatttttaacagatgttctaataaagacagagtgcttcccgcctatcagtgtcatgccacatacatttagctttaattcagatatccatctcaactttctttggaagatgcatcgtctggtattctatatcacctcaaacacataaggcaaatcagggcccagctaaaaatggactaccacgacatgctagtgcgtgctggctcacatcaatgcggacttgtctgcaatacagacacactagactctttatgtgcttggcctgctgacagctgtacaacatatgaattgcttgactctttccccaccaggccatgaatgtgcccaatatctccacgcatcccagagttgctctgaattcagcacctggattaaaatcctcacagtgtgtccttacagctgagaagatgatgttttaatagacttgctcagcagtaatttggaaccccaggtaggccttaaggacttctagaccagttaaataaaaataccaaaaggtggaaaacaagagtgggtagtttgttacccaggtcagaattccaccacnnnnnnnnnnnnnnnnnnnnnnnnnnnnnnnnnnnnnnnnnnnnnnnnnnnnnnnnnnnnnnnnnnnnnnnnnnnnnnnnnnnnnnnnnnnnnnnnnnnnnnnnnnnnnnnnnnnnnnnnnnnnnnnnnnnnnnnnnnnnnnnnnnnnnnnnnnnnnnnnnnnnnnnnnnnnnnnnnnnnnnnnnnnnnnnnnnnnnnnnnnnnnnnnnnnnnnnnnnnnnnnnnnnnnnnnnnnnnnnnnnnnnnnnnnnnnnnnnnnnnnnnnnnnnnnnnnnnnnnnnnnnnnnnnnnnnnnnnnnnnnnnnnnnnnnnnnnnnnnnnnnnnnnnnnnnnnnnnnnnnnnnnnnnnnnnnnnnnnnnnnnnnnnnnnnnnnnnnnnnnnnnnnnnnnnnnnnnnnnnnnnnnnnnnnnnnnnnnnnnnnnnnnnnnnnnnnnnnnnnnnnnnnnnnnnnnnnnnnnnnnnnnnnnnnnnnnnnnnnnnnnnnnnnnnnnnnnnnnnnnnnnnnnnnnnnnnnnnnnnnnnnnnnnnnnnnnnnnnnnnnnnnnnnnnnnnnnnnnnnnnnnnnnnnnnnnnnnnnnnnnnnnnnnnnnnnnnnnnnnnnnnnnnnnnnnnnnnnnnnnnnnnnnnnnnnnnnnnnnnnnnnnnnnnnnnnnnnnnnnnnnnnnnnnnnnnnnnnnnnnnnnnnnnnnnnnnnnnnnnnnnnnnnnnnnnnnnnnnnnnnnnnnnnnnnnnnnnnnnnnnnnnnnnnnnnnnnnnnnnnnnnnnnnnnnnnnnnnnnnnnnnnnnnnnnnnnnnnnnnnnnnnnnnnnnnnnnnnnnnnnnnnnnnnnnnnnnnnnnnnnnnnnnnnnnnnnnnnnnnnnnnnnnnnnnnnnnnnnnnnnnnnnnnnnnnnnnnnnntcactattttcccatgtattacttgggaaagtcctatcttcactgtagctacaatctccattgtcttgctcatccacttttattctctttgtttgggggagggtcagataaagtaatggaagctggaaagcattgtttatacaacaatggtaggtagggatgacctttggtttctttcataggaagctgtccagtaaaatttgctgaagcatttgttaagtcttttgtaaagacttaaataaaaaccctaattgtgtgtgtgtgtgtgtgtgtgtgtgtgtgcacgtgcacatgtctgtatgtaaacactgaggtcagagaaggtcactgaaccccctggagcaggagttacaggcagtgatgcactgcctgatgtatgtgctgggaaatgaactcaggtcctctgtaagaacagcaagagttcttaaccgcggagccacctctccaacctctgtgtttagggtcttaatggcctaggatactggaataaactgagatgggagaggaagtaatctagtgcttttcaattttcctttttaaatgtagtatattaggaatttataaaacatgaaacagctaatctcagaattatcttgtctaaggcaaaaagtttctcattagctttttcttcccaaatagtgttattctcaaaagccacaggtatattttatgaaaatgttaattgatgtacaaaaagcatatttctatctattataaattgtatagcattctggcatcatctaccctaattttgtttttctctattgatttagtaattcttcagcaaatatttatttggtatctaccctctaagttctacattttagtgattataataatttattatcatttatttttttctttttaagtgtatgtccatattcatgtgtggataaatctctctctcctcaagtaagctagtctggccagccagtgaactctagagctctgcctgtctcttcctcccaggaccaagaattgcaagcatgcacaaccatgccagtctctcattttataaaacatggattctgggccatccaacctaggtccttatgcttgtgcaggaagcactgtgcccacggggccagcatcactgcctggccctgcaggaagcactgtgccaacagggccagcatcactgcctggtccttcatggctttagacagtcattgttttaggttctggggtacatcacatggatttggactaaagctgacttggaaaatggtttttcaaagttaggtaataagattgtacattttcaggtttgctgaagtacgattaaataactcagcaataggaattcagaaatggttcccgtacgtgataggagagccagatgttttacaaaaagactgaaagatttgtgttttatttttcacaatttccttaagaaattaataggctttatattttatagcaactttagctctacagaataattgagaacagaatatcgagttctcttaaccttccactctctcacttggttgccccgctggcaacatcttgcattggtaatttttatttttatcaaccattcaatatgtacgtattaaacatttcatgtcctctgttagttattacagaaggataagagaaatatatcacatttatttctttgaaaccatgtataatgatacgtgttcatagtttaaggtcctgtttatttaaacagctgctgcgcccttagtacttgcccagcattgctagagctgggacattgtaggcatccactgattgtgtgatattaacaggtaaaggatctagaagccaaacataatctgtctttaggatttaggagacacagtcacacccagctgtaacagaagaaaatctcaaaagcaatacagagcagtgcttaagcaagggtaggggagacaggtatcagcaaaggcaagcaaaccactgcccacatgaccagtgtcttggctgggacgggcccagggggtgcacggagagcactatgctcctcctcatctctgttgatctccatcagcatcgagtcatgcttatcattccacatctgcatcaaagactgaagacaaaccacacagctcatggcaaggcaggagaaggtgtatgtgtgtgtgtatgtgtgtgtgtgtgtgagattgtgtgtatgcatgattgtgtgtgattatgtgtgtatgtgtttgtgagtatgtatgattgtgtgtgtttgtgtgtgtgtgattgtatgtgtgtgtgattgtgtgtatgtgtcatcattgtgtgtgtgtgtgattctggaagatctaaagcaccatcactcagatacaaatgcttcacatttcttaccgggagtaaaatgaattaggattttggtttgtaaaaggaactcataccctggcaatcctcataggagctgcatcgaaatgctttgccatcctgcaacttcatagacgctaataaaacttagagggtgggtcagggttacagagatctttacaggacaacaaccaatataacgaaacagagggtagaagttacattctctccagaagtgttaactcttactggtgaccaggtacagctctgcttgcttgctcattgttgagtcagactttgactctgtagcccaggctagcctggaatttaactatatagctcaggtagacctgaactcaggatgatacttctgcgtcatctttccaagtgttagacttagcgggtgtgcactgccacacctggctcagacacttttctaatcttaggatgtatggattatatagctttaaaattaagaaggtgatgataatgtaaaaatagcataagaggaaattaaagagaaacatagattgctgcttgctagccttggttgaatcatgatataccctttttacagaaatgaattaccttttcaagttaaaaattcccattcccaacccacgacctagcaagttatttggggggatatggagatcggctgatggtgaagcttacgtggagtcccgagatcatgcggtggtgcatacctgtattctggcactaggaaggccgagtcaggaggatcctgttcaaggccaacatacagtgataccccgcttcattgaaataatgtttctatggggagcatatagccagcatagctgactctatgttgatgaaggaatacagttgaagaggtggtaccttatgagtttagggttctctataaagctacagtaatctaggcagcacagtactagcaaagaacagtgtgtaatagcatggagagccctaaatcgaccaacacaaatacattcagagagtattggacaaaggagtaagagccgtacagcaaagacaaggaagtcttttttcttagcaaacccaaagattgtagacaatcactgccatccttcacagaagttaaagagtatcccagacccaactgtgcatttgaagctacatgaaggagataagagataagctacaaaccattaaaattaacttcctccttgttaaagacaatgtcaagagaaatggggatatcaaccagagattagggaaaaacatttgcaaaagttgttttctaagaaatacaaagaaagctgggcgtggtggcacacgcctttaatcccagcactcgggaggcagaggcaggcggatttctgagttcaaggccagcctggtctacaaagtgagttccaggacagccagggctacacagagaaaccctgtctcgaaaaaaaaaaatacaaagaaaagagacattcaactttggagcaaacagacaattgcttaaaaaaaaaaaaaaaacgatgaaatacttgaagtacacttcaagagagacggagggcacacacacacacacacacacacacacacacacagagtcagattcccataaagctacacacacacacacacacacacacacagagtcagattcccataaagctacacacacacacacacacacacacacacacacacacacacagagtcagattcccataaagctacacacacacacacacacacacacacacacacacagagtcagattcccataaagctacacacacacacacacacacacacacacacacacacacacacagagagagagtcagattcccgtaaagctacacgtgctttcaccgtaggctgtagcaaatacacactctaatatttgcttagatgaatggaagactttggccacacagaactacatgtgacttttatctgaatctagagtggccaagatagccttcagtccaagtgacacctccctcagtgggggacgctcctgtgaaggcaagaagcataggggaaacatcgcagtgtttgctcagttcctctgtaacccagagctgctctacagaaaagtgtaattaagaacatatccccccccccagcctgtaagtactaacactatgactctatctttagctcttttttatctgaaggaaagtattgtgatataataatagctgggcattatttttatttcaaaatgattgattatgtgcctttgatagcatcattgtagcagttgtattttaagattgaatagtattattttacttaataaagcaatgtgaagcagaaactttaaagattaccggttcaccgcaagtatccaagcgctccaggggatatttgataagataaaaatcttcttgccacatgacaactattacttaaatgaccatcatttacattattatagctatgacaacagacagataatcttgcttaatatcatcctatcataatatcctaagatgttatggttggaagtgcagtagaccaagggttaataggctgcaattctgattttaactttgcaaacttttaacagtgagactttgcatggctattgttcacgtctttgcacttgaaatgttcttttgtgggctggcagaatggctcatggcacgacaagtgaagttgcttgttgccaaacaaagaccactggagttagttcactgtgggcctgccatagcaaagggaaagaactgactctctcaagtcacctctgaccaccaccacacatgtgctgtggtccacatacacgcacacacagacgcatgcatacatacaatagataagcagatgtaaaaacgtaatgctcatatctagaaagaacatcacaaaatcccagttgggttctgataaacattgcctggaactagcacccacacccagagtcatttcacagtaaaaccttgagtcatatctgctgctctctgaatagatccctgtctccctgcacctcagctaaatagtcctcttcttaaagtgcaagcttcagtttcagtgttcatgcagctcagatcatatatacatatatatatatatatatatatatatatatagtgtgtgtgtgtgtgtgtatacatatacatatatatacatacatacatatacatatatacatgtgtatatatatgatgtacacacacatttttattaattacattatttacttacatctggatcgaagcttcctctcccctcctctcctccctgtctctccctctcccctctcccctctcctcactcccagctacccctcctccccttctcctctgaaaaaggggagacctcccagagatatcaaccagccatggcacgtcaagttgcagaaggactaggcacattggaatcttctcctattgacggtacgggaaaggggttcaaaggcaggcaatgtagtcagagacagattcctcactaggagtccctcatgaagacacagccacacaactgttacatatgtgtagctcagatcttatttattggaattccaaggattttttttccctaatttttgtcaggatgatccagttaagcaaggaccatatgtaacttaggtggtctctataaatcactttgagcaaaacccataaatgagttcttaactggctccttaaaataggctttttatatgccctccacagttctgacttgggaaatttcttggacaggagcaatgaaagcctctcaattctgtttttgagaacataaaagaattcagtgtctgttaattgctttcgctgtcagatcaggagtcaggtcgtgtggaaatgacctaagcactgaatgtactgttgggagctctgtggtcaaattctatttcttatacattgtaacagtcgaagaaagaggctggtgtcttcatgaatatgttaaaattattatagtttaaaaattaaatattataaaagtattaaaattacattttaataaaggaagagagacagagccttctcacaggttgacagaggggtagacgtggtttgtgagaaatattttgttaggactatcctcttgccatcacgacatgaatactgtgtgagtctagtttataagaaacaattcagcttcttgagtgatcagttattaatgtgctattaatacatgtataaatctggggctgcatagatggctggatagatggctggatagaggatgtgagttcaggtcttagcacccatatggcagctcacaggcagatgtaactccagtttgggggcttccaatgctctatgctggcctctgtgggcaccaaggactctcatggtgcatatacatgcatgcaggccaacactcatacagatatgataaaaacttcaaaatagttttggaaatgtataaatatgaannnnnnnnnnnnnnnnnnnnnnnnnnnnnnnnnnnnnnnnnnnnnnnnnnnnnnnnnnnnnnnnnnnnnnnnnnnnnnnnnnnnnnnnnnnnnnnnnnnnnnnnnnnnnnnnnnnnnnnnnnnnnnnnnnnnnnnnnnnnnnnnnnnnnnnnnnnnnnnnnnnnnnnnnnnnnnnnnnnnnnnnnnnnnnnnnnnnnnnnnnnnnnnnnnnnnnnnnnnnnnnnnnnnnnnnnnnnnnnnnnnnnnnnnnnnnnnnnnnnnnnnnnnnnnnnnnnnnnnnnnnnnnnnnnnnnnnnnnnnnnnnnnnnnnnnnnnnnnnnnnnnnnnnnnnnnnnnaatatgaaactaggtacttctaaatgcttataagctcatacataggtgtagtggctattccctggttgtcaacttgactatatttggaatgaactaccaatccagaattggaaggctcaccagtcacccttatctggaggcttggagatagaagtttctgatctggatcttggtatggagaacttgaggcatagtggctatggattccagaagactaaattctccaagttcaaggtcatccgggattaaaggtgtggtggaacacacctttaatttgggctacacctttcatctgggattaagggtgtggtggaacacacctttaatctggctacaccttctgctggagacaatataaggacattggaagaagggagtcttgctcttgctcctttgcctgcttgctgtgtgagactgagtaactgctagatctttggacttccattcacagctgcgactgaaccattgttgggaattgggctgccgactgtaagtcatcaataaattcttttactatatagagactatccataaattctgtgactctagagaaccctgactaatacagaagttggtaccaggagtggggtattgctgtgataggcctgaccatgcttttatttgaaagaatgtggattttgggactttggatttggaaaacagtggaatgctttaaatggggcttaattggtcatcctagtaggaatatggaagactttgttgctgggagtaatttgaactgtgttgacctggcccaagaaatttcaaaggagaagcatttcagtatgtggcataaagactgtttttgtggtattttggtgaagaatgtggttactttttgcccttgtctgaaaagtctgcctgaggctaaggtgaagagacttggattaattgaattaactgcattgacaaaggaagtttcaaaaaagcccagcagagactctgttctctggttaagtctcacaaagagaagtttgaacaagcatagcaagcttagaaaggccaaatataaaatatatggttcgagtattaaaggcataccaggaagtgaaatggagcaaaatcctgtgttctaggagatagcagattaaggagtgggaccttggggcaaaatcctacccagctaaattaaatccaggtatagtggtacacacctttaatctcaggagactggcatgctgatctctgcattcaaggtcaatctacagagcaagatccaggatagccaagcttaggcagtgaaggatttggaaaacagaaagccagtgacattgtaatagcacaagcaggtcatgttgtagttcctgcaagcagcaaaactctgcagcttcagccacgtggctctgtctctagagttaagaatggaaggaactactgggacaattgatgctggttagctggagctaagaaattagcagtgattaagaagagaccagcatcactgaggtgaaatcttctgggaagtgttttctgggaacacaaagaagctatgttccagagatagccaaggttgtacctcttgctgcagctggacttggtaatatgtaagagtcacccaggtggtactggttttgaaggcatgaagatgtaatgaagaacagctgaggcttggcactgtgagaggtcatggaaggccattggagaaggtgtagcctcagctgtagttgatggcccaggactgaaggggtcatgcaaaggaggctattggtgaagcctagttggagtggaataccccagtgtattggagatgtcagtaccatggagtgatcaccaagagctgcagctgtagtggagtggatcaacctgagcttagagtgctacagagggcagagctggagaagtgatgccagcccttaggaggagtctaaaagatgaagtggaatcccagacactgaaacaagaagctgtaacattgaaattgccttggagactcagagatgttaaagatgccagagccatgggatacatgctgaggaaagctgctaacagggagtggaaacagcccaggagaaagcagtttgttgcagtcaacaaagatgaaaaaggagtggagatctgaagatcgctttgacatcagccatggagatgcagagtttggaatttgcccagctggtttcctgccttgctttggggattacagttaattaagttgaatgaatctcagaagagaccttgaactttggacttttaacattgttgcgactgctatagactatgaggactttgaaagttggactaatggcccccatagactcatgtttttgaacaagtctatggggaccagggagtggaatgtaatggtttatatatccttggaccagggagtggcaccatctgaaggtgtggccttgttggaataggtgtgacctggttggaatgggtgtgtcattctgggtgtgggtataagatcctcaccctagttgcctggaagtcagtcttccactagcagcctttggatgaagacatagaactctcagctcctcctgcgccatgcctgcctggatactgccatgctcccaccttgatgataatggactgaacctctgaacctgtaagccagccccaagtaaatgttgttaagagacttgccttggtcatggtgtctgttcacagcagtaaaaccctaactaagacaataggtaaccataaagctaaaataaatttattattagtgcaagctaaggtcaatttattggtgcaatcaaatgattagtgaaatcagattcagttacgagcgtggctgtaatgggacagatgatggggctcggtgtgaatttatcatgagtgaggaagctagtggctggcactgaacagccttttacttgtaacttgggtttattatattatattattattataatacttatgcagagaaggcttgctggtgtaggcccattgaataaattgtcttagcctcgaggatttattaacttagaagacttggatctcaaccaaaatgcattagcagttaatggtcaattgttaggttttgttgttgttgttttggttttttggtttttttgagacagggtttctccgtgtagccctggctgtcctggaactcactttgtagaccaggctggccttgaactcagaaatccacctgcctctgcctccggagtgctgggattaaaggcgtgtgccaccacacctggccaattgttagttttaaatttgaccattgactaaattgctgtattatttacttgtctcatttctgtgaccaaatgctcccccctaaaaaaaatcttaaagaaagggctgtttttcactcatggttagtggatgcggaccatcatggcagggggcgagcagagcaggcatggtggggagtgtggccctagctgtctgtgcaggagtgtgaggtagccactgtagacattgggtccacagtcaggaaacagagatggatgctggtagtctgctttttccaattctcttttcttttttaattcagtctgggacccaagtccatggtatggcaatgctgtcttcaaggcaggattttcctccttagtaaacttctgggcattctctcaagggaaggtctgcagtgtatcttctaggagattccagtgaccattaagataaagtatcacaattgctaactcacttgacgacaaggttaacattgtggtgacattaaaactgggactaaatgtgcatttaaccccattactaatagaagctggacgaaatcattcaggtgtgtgggtttctgccctagctctctgtgtataagctagtacacgctgccatgtaagatttcagattccaaagctcacatctgcccgcagcagaacagctgtgtctgaatagattaaactgcctcatgtccagcagagactcagtttccccactgcttcttctctttccagattggtttgatctggcttttgtttgatgtttgcacgattacaaacacaaatgaaaagctaggtgctaagactgaatggatgtcgccacctagctatctcttatactaaaagtcaaactagagaattgaagatatagtcattttataaattctagaaatcgtgtgggcttcaagaatacattgacaataacctattacaagaaaactaatgtagggttctataatagctagtccctgtcaacctgacataagccagtaatctacgaagaagcaacctctgctgaaaaaaatctttccatcacagtgtcttggaagaatgtccgtgcagaatttttttggttcattattgacatgggaggacccagcacattgtgggtggtgccaccattgagtaggtagtcctccgttgtattaaaaaaaagcaggttgagcaagccatggagagaaaacaagcctgaatgcagcatttcttcatagcctcagtatcagttactgcctctaggttcctgccttgagttcttattctgccttccctcagggatggggcatgaactgtaagctaagcaaactcttcgttctccaagttgcttttggtcattgtgttatcatagcaacagaaaagcacattaggacaggcttggtactttccaggaagccttctttgatcttctttcaaatctcactaataattattaagtgctgctaataactgattagtgctgttgtgcattgtagaaaattcaagcacttcacataaggagtctctttgaaactgtcaagtatggcaaggtagggacttctgttttgcctcgggacatatgactcttagcaaaagtcaggcacagggtgtggaagtagcttacttagaatttgaacctgtacctttctcaccgcgttatacaaatcttccttatcctccagatgtcttcattatgcattgtgagtcttttattacaagtaggcataatgactttgtgtgtgtgtgtgtgtgtgtgtgtgtgtgtatgcatatccatgtgtgtatgtgtatgtagatgccagaggtaaaccttaggtgtctttctttaagagccattggttttttttgagatagcttccttcactggcctggagttcaccaagcagatgaggctgtggctggcctatgaacaccagggttccacctgtctctacctcctcagcacaccagtggacctgactcttttttttaaatgtggatcttaaatattgaacttaggtcctgcttgtgtggcaggcgatctattggataagccccactcgcgttcccaagcacagctgttttacaattaaccctaaatgtttttctttttcttttataaactagaccagcctttcatctggctttcaaacttccaatatgcttcagacttacccggaatgctttaaaaaaaaaaatatatcaggctttgctccagccaatgaataggaaatttccagccagtgtctagggggtcactatttgttttagcagtctccttcagacacacactgtgagtaaaacacctgtaactgactacagatgactcaggtaccaggactgacttgtctctttgcttgtttgttttgtggttgttgttaaaaagaatctgtgcttgcatattaatatgctgattacaaaatgatagcgatacaattaaaagaacgaaggaaagatatcgcggttgccaagaaggaaagctttcttgggatgaattttgttgatcagcctctttggactgtttagagacacgacacctgacacaccctgtctagaccctcccccctggagcaaggcaagaagctggtggagaagtggcagaaagctctgctctgtctttaggaaaattagaagaattctctgggtctactaagaggagatagaatatttctttttcttcctattttccaagactgaggtcattttaactataaagatctgttctaaatgcgtttgcgttctcaaaagaggttagtagtcctagtttttgacttgaagtgttataggctttaaaattgcacttgatcttagccaaaaggccgagaagcgatacaattgcacgtttaatttatagtcatgagacaaatgtggatcctttcttttgtccaccaagatactttccggatactttctaagtacacttgagaagcacgatgttttcccttcccagggttagtatggatcaagaaatgcaggaacctggtaaagagcaagacatgcaaagataggagagttggagtgggtgaatcgcctgttccacctcagggctgtggtgggggggaggctggaaggtaagaaccagaggaaattggagaggctgagacagcagacaggcagagctcagcagtcatgctgcacgggtggccagggtgtcagcagaagggcagcccaaggtgatgaggaactagctgggggagaatggaatgcctcgtaccatactgttagggcatcagtgagggaccttggttgttgcagagtttggaacaattcctttctgtgaaagcaaaaacagtgttttcttaagaagatgaacaggacagcatcttgtaagaagatgaacaggacggcatcttgtaagggacatggcaggagagaaggagttaagtaggggtattcattagaaagcttctttcagaggtccttgcaggactttgagtcctgaggttttagatcaggatggtgaagtcctagagcagacatggagggacctgactggatagagagtgcctttgctaacagagaacagaaggacacacttacattagccgaggctgagcacacagggacctgtggatggagcccagggtctttagcctaggatcagagctccggaagggccgcatggccacttcaccctttgctgctggcagtgcatgtggctctacttcctcttttccttcccttcccttgcatctcatggcttccttactaggtccctcacaaggaagactgctccatgggaacattttgcttgggatagcaaaaggaattcttgctaatgaggtttatgttgtccagagtacaacctttggaaaattgtgccatgttagtagataacaaagcaatggggtagaggtgaaagtcctgtgatcaagtgaacttggaaaatgccacgagagacttgataggcttctttcttttcaaatggtagcaaatgcattaccttggggctggggagatggcttaatttggaatgtgctgatgtgaaaacttgacaaccccggatttgattcccaacacctcggtaaaaagctagccatggtgccagatgcctgtaatcccagctctggggaggctgagccaggatacctggagcttgctggtcagctagttctagtcaaatgagtgagttccagatccagtgactgtctcaaagacagggtggagagtgatgaagaaaaacagctaaaaactgacctctggtctctgcatgcacctgcctgcacatatgtgcacatgaacatgcatgaacatcatgatacacacacacacacacacacacacacacacacacacgagagagagagagagagagagagagagagagacagagacagagacacacagagagagacttatcatagagggtagattgtagtatgtcacaagcttcctgaaccatgggctctttttagaaggagcatcccaggggaagagaaatgcacagacacatggcaaaatcaggcactgggaaagacatcatagaaataagcctcttaatgctggaagtttgtatgtaatggaaagaaacaagaggctgggatttgggtctggaatgtacaatctgacaaccagaggcaagtcactgggttcctctcaacctctcaaccccagtgtctgtaggctttttttttcctttctttctaatattatatggatcctcaaggtcctttcaaggggtctgagatcatgtgtataggcagaagaaggagtgatctgtgatttttctgctctgtaataactggtatggaaacaggaaggagaggcaatggggacagtgacaagatgatgagcaagatgtggtttgagcccctgagctgattacatggttgggcccgacactgctggctggtgtggcagagacaaagggagtctgtagctcgttcccagacctctgtcacaccactgtgccatgtgctgcatgggcaacatcctcgatgctaagacaacgctcattcccaatgctcactcacactgtctcagttttttgaggtagatgctgtgtgatcctggttagatcagccttccggattgagggttcttcatctgcaaaaataaggagcttaattttgggtcagagttcctgatgttttgtaagaaagaactgtttttaaatagttccaagactttcattgaagatataaagggtatataggtatttttcttacttagtgccagcagtggaccctaagaatgttcttggttttctccttctttggtcttctcacctacttcaaatgtttattcctgacttaggtagttaattcatccacgtagggacagcctcagactcactagattgccaggctcaatcttgtgtctctttacatgcaatgcctatctttttatctccataggaaaccaaattgtttaggttcaacctttcttcatgaacaaacccttcttttggttttcccagttacaaaaaagtaaggatcgtgtttctgatctcctgtaggctaggagctcaggctctgggacttcctccttccctctcctgttgctagtcatggggccactctcaactatgcctacattattattattattattattattattattattattattattattatactctacattatttcttgtttctgatgctgtcactaccacaggtcaggttctatctggttattatgctctctgtctctcctttaaagtcattcacatgccacattcagccccacagagcttccccatagcctttgttcgaaccactcaggctgccggcattcacagccctgtccccaccttgactgttgaccgtcttccagctctctcagttacttacctgttcctggcttctaaccatccatttattgatcttctcagcccacattctgtctatccagatgctcccttctcagcctttcatcctattcttttttgcctaaccaagtcctaggaatatctcaaaaggtagcttaaacaatgccttccttctccatcaacaaaccctcaatcctgtctggtgcctctcaggagcaatcacaatatcacttaggtttcttggcaagtctttgaagataatagttttagaactaaaaccctaaatgtgacagttgtaaagacaatgaagtggggctctagcatagagaagcccgggaccatggtcttggctgggtcttactttcttccaaagtgcttttctttctcttaattcttgtgcttcaaatctgtattacaatatcttcaataaaacctaaaccctgttccatacagtcttggcctgacattctttgctgccatttactggaattgaggtccctaaaagatgaaaggaagtccttaggctgctagggatgacagcatagtgccttatcttcatgtctgtcactgctgatgtgtgcagagtttaatatccgagggatccactgcaaacctagttaattgtatgagttggttcttccttagcttcaaaatcaggaaagttgtaagccagcaggattacccatttgtgatctttgtgctacagggaagcagctttcggaagcagggccttgctctcccctcatgtcaacatgatgttgatgagagaggattctatttgtaaacagccctgcgcacaggacccctgatcctaaggcatgcttaataataagccctgccatgaaatgacagacatctagggcaaagttttagctgtttctcagagttggggagatttcagctgtatgctttgttaggaaaccaaaagatgaagaaagctgtctttagctacgaagcatctattcttannnnnnnnnnnnnnnnnnnnnnnnnnnnnnnnnnnnnnnnnnnnnnnnnnnnnnnnnnnnnnnnnnnnnnnnnnnnnnnnnnnnnnnnnnnnnnnnnnnnnnnnnnnnnnnnnnnnnnnnnnnnnnnnnnnnnnnnnnnnnnnnnnnnnnnnnnnnnnnnnnnnnnnnnnnnnnnnnnnnnnnnnnnnnnnnnnnnnnnnnnnnnnnnnnnnnnnnnnnnnnnnnnnnnacatacatatgtagagcattcctagaaaacaattcagaacagataagcaattgcatccagggcaaaggatgatagtctgaggtgcccatgagacttttcctcacgtgagatgctatatgggatcccttcaagtcctcaaggttcattaggaagatccacatgataaagttattttcataacagtgccaagacatctcttgctgtctccaccctttctttctgctgtgagtaccacagaggagctttccagaggttaactgacatgtgatactacaacaaattgaatccagaagcagatatgataatctagttatttttgatgaagccagatgtttgtgatatcaaaaatgtaaaacaatgttgttatttcataaagctccctgggaagaatttattttttttgtagcatttaatatttatgttaacataattgtcatccaggagtatataataaattttaaatgctccattttaatttataagttaagccattttagcagatagacttgaaatccccttgaggttctctgggatgtgtccagtcccatcagaacccggggtgcttgggatctcatggatggggctgctaagaaggaacaaaatgtgaatgaagcaaaactttgcaataaaatattacttttctttccccctcccctcaagggaaatctacaagcaacctgacatttggtgctcgtgctctagagcattctaaggctcgctgcttgacttctaaagaagctgaaataattgaggaggagcggggaccctctgtttccaaggactctgttctgcagagaatgttctgcaccctctgatgtaagtagtcactcgctggagctctgttgcacatgacattgaaagtcagggtggtgccatgttgaaaatcatctgtcttggttaaagttggacttacccatgccagcactcatgggaatgttgggtccctgggtgtgattactaatattacaatctcaataattgttataaggtgctctatttcaacaatactttgaagtgactcacaaaaaaaaaaatgatattaaggaccaccaaaactggggtctagagcagtaatccgaactccagttttagaagagtaaataacagcaatatgtatctcagagatgctgcagatttagatactgagtcaggatttgagtcataaagagaagcatgctacattgcagagattttttccaggagtttccccattggccggacttcacttctggtctccatgggccttctcgcttcacactttgggcaggtcagatctcaccagtgaatctaacagtgtggcagcttcacaaatctgggtcttttctagcctagggctcactgatatcagaatcatgtcccctttaagccggagctgtatctccaggacctagcataggggctggcatgtggaggatgctcactgaagatgctcaaggtcagagccttggtttagacctgactctgagactttcctattcaggaactcactgaactaagatgtatcatttcctttgtgcctgcatcttcacctggcatgtgaagactgctcagtggggattgccttagacttgcctgtgtcccacactgcctctggaatactgttgagtgttgaatgactgagcgaagcaggtggaactgtggaataagtgattcctgaatacggggaaaattcagtgccccttccttagaccccacccaaggaaatttcttctgttgcactatgtacacttttctgtttctgatcaagggaattcctcactattcgttgcctccttgtggtgatgtcatagtttaatgaagtctttttgcagattgctgcatgagtcttcctcctgctcgccttgtttgttgttgttgttgttgttgttgttgttgttgttttgttttgttttgttttgtttttctttcttcctttgataaactcttagctggagccttcacatgggatggatgttccagaatgagtaattcatagctatacttagccactaatcagaagttattgtgggctttctctattccattagatttgccagagttattcacctatgaatcattccacgctacgtttcaggggctctgactgtggtctcacttcttctcttccatctgaaatatctatttccaggagccattatttcaatatggaaggcatgtgcacagcccagtgacctgagacttggtttgggtcgtgtgtgtcgccccccacccccaatctcttccatggcattgtacctgggagctatctcaagttcattggttctttcaagcaaaagccttttttgtcaacaatccaagttattttgagctgccagaaacaataagagggctattattgtgtgtgtgtgtgtgtgtgtgtgtgtgtgtgtgtgtgtgtgtgttgggtgggggaggttgatgttggggagttgggatagaggagagggatagtgcaaaagttagaatcaggagaaaggacagagtcagaatggaagacatggggagaaagtgagcagactgaggaagagagaggagaggcgagaggaaggcaagctgaccagttctaccgtcatctcaaagactacagttctgaagcagttgaccacctctccctgggagctctcatatccactgtggaccaggctctgtgctatgcagcctatgctttaatcacataggcaagcagagcgctaggagtttaatcgcccaaagctgcagttaacttccgctgtcagaatccactgtaagactgtcaaaaagcaggtggccacacaggtcaagctccagatggcctatgaacaactctttttcctgcatgcttcagttgggatggtggtcacgtggtcacggtactcataagtaactgattaatgttaaggtctaagcagactgaaacagttgcgtcctttctggttgataacctggccaacgagaatttgtttttgggttttcaacctcagcttggttttccctcatgacttagatgaatctttcccttcattcatctgtggtgggtggcagtggtcccacgtgtcctggaagaaatgtgctcaaggacataaaggcagcactgcccaagatattggaagtggctgaaggctgaatagaatcaaacctgggagccatgtgctggctactgagtacttaatggctgaggtaaatgagacaccgtgatcttatggatggcaagttgtgtcaggattagtttagaaaaggcgggatttggataagtaactaattagggaggctccaccactgtcataagtctatatacttatagagtgatgggatggactagaaacagaggcaagcaaatctgtcagaggggaattgaagtaaaacatgaccaggttgacttagacatttctggatgaacagtcctccagcagtgctcccacagtgctcccaaacgcatcagcttgggacagatgtcagcgacgtaagcaaagcactggcgtctgggagtcagctctgttggtgctgagattcaagaactttgaatgatatttttacttttaatgaaacaggaacaaaggttattgaatgtctgaggcattcttgggattatggacgtgagtggaagggaaagaagtagacctatgttagtaagaggcaattccagctaagtattcatgggcaaaaacaagggagggagagagaaacagatacgagagagacagagagagacacagagagagacacagacagagacacacaaagaaagtcagactgagacagacagggagagggagagacagagagacaaacagagacagagagagacagagaaatggagagggagggaggaagagatagagacagagacagacagagtcagagagagggagagagaaagagagagagacagagagatacagagacagagagagagacacagagagagacagagagacagacacacacacagagaattgcatatgctcaggtgggtagtgacaatggcatctgattctggaatattttagaagaactgccctaaggcttaaaggcatggagctgcagctaaacgttggtgctaggaagaactcccaacatgtagaagggagggtgtgtgatcggttgttattgttggagttggcttaggccacaaggacccagagagacctggccgggcacgtgaggtggagaagagaggaaatagcagtctacttggagcagagggtgggtggaggagtggtggataaggttgcagaggagaaaagctgccagagggggcagagccctgactgctggctggggtaagacatctggatgccatgttggggactcagcatttgtgctgtctttgctctggtggggagggggacttcaactctagacacctttattcctggtgtctgttctgttgagtgaaggtagttctgaatgaggtttgagatatcataaaagtaaattttcaggagaaagagtatactgggggtgggggtgggggagccaaaaatatatgcacatgacatattttggactagtgttttctaagatttcaatctgttagttttgctttgatctttaagaaccacccacaaactctgttgctctcagagcagaacatgggctgctagcgagacatattgctttcatagtttcaactctcagtcttagaagttttcatatcatattgaatattttagctcccatttgtgggctgtggagagtaatgttaagtgtcccttgctggcaatgttcactgaattgctaccggagcctgaacctaatcttagtccctgcttccgaggcacagggctcctgtttccttccttcaaacagatggtagggaacgaactaagaaggaatttttaatggaagtatgtttgggctcgatgggcataggcatgactacttgagtttgatctccagaccttacagtggaaggagagcactgactccctaaagttaccctcttgttttcacaagtatgttgagatatgtgtatgccagcacacatgtgcatgcgtgtgtgtgtgcgtgcatgtgtgcacacacacagagacacccacaatcctttgcatgggctcattatcacctgtgttttccattggagaagcagtgttagcccccgcccacttctggtctggcctctgggtagccagattcagatgtttccttcttttaatttcctggggaaaatcccaccacctgtgtcttatttggggtttttgaactgtgagatgatggcacccacacttcctagaatagctgcatccatgggccaagtgtaccagactgcacacaacaatggaagacaggatttagggcaaggaacagcagaggcgctgggaccaggcatctgctccacaaacatacagctgagtccggaggttgtgggaggagaaggcagggccccactgactcactcgaggatgtgggcacgctggctgctctgatctgcaagtcgtgagggtcctagcctggcttttcttcaagaacaaaacttcaaaggaggtaggcataggatgaagcagagttccctagcacccaggaggttttgtgtgggattctgtgagaatctgctacagccctgggtgttcaaatctcctccctaccatttttccccctgtctccatagcttagcactcaaatgattctttgagaaggtagggtaggcacaaatggaaagccttttcttcacttcagttctagagtctggcttgtatcttgccaattctgggagattataggaatgatttagaacttgtatggaaaactacctgacctcttccagggagacctcagggaattccttaaaatatttaacttttcttatgtctactttagtgctaaagaagaagatttcatcctactgatcccatggtgttttatgctgtggcttattcatttataaaccttattatcattattattccactgaaaaaatactagacctttgctctcatgtaggtgctaaagactgtaggaaaacttgatttcatcacactgtgtaagaaagactggaagggaaagcagctaggagctgcgggtgcctagatggatagcccaatgagagagcaagggggcctgtagccaagcaatgccaagcagaagagagaggaagaggttttgccctcactggagagtaacttcactgactctgggaggaacgaggcacagcctactgtggctacagagcaagggacagtgattgcatccaggagaagatgatgcggaaagtacaggccactaggatcaagaaaacaccattaatctttggttgttgttgcaaaattgtgctttccaaagccttggtcaaggatgcagaagcctcaggatgagccctgggatgctgtcctaggaaatgcgcagtggaattccccttcataaatcctagaggctgggagggcctctgagaagaggaaagagctgcagcactgcctggaagacggcagaacatgggcacgcaaggagtagccaaggagcgagagatggagagatatttttcctttcttaatcatggggaatatttattaagtaataaaaacctattaaaatagaggttactttcattcaataaaatctctaattctttctgatcctaaaatcatatacttttgaatatattaagtaacaaaaagtagaaatcgaccagacaagatctatgagtgaccttaaaaagaatccatactgttcaagaaattttgttttatgaatgcaccaaggggttgctctaaaaggagctggctttatacacaaagaaacttattacaacattttgtatatataataaaggaatgttgtaaattgccgattttgaggtcaaaattttatatgtgtgtgaaaaacctgtcaatcagtgatgctctcttggagtgtgagataacacaagacagtctttgtatttttagatgaaataaaaatagaagttaacaaagttatacaaaaagtacaaaatcaatgcatacatatgcccaaatgttgatgttctactttagttccccattgacataatacaaaactacaagagaaagcaacttgtagaggaaggaatgtctttagcttacaggttagagttcatgactgagagaagccagggcaggagcacagggtagaaacccggaggcaggcgctgaagcagaagctacggagggatgctgcttgttgcagctccttgctttgtctctaggctcgtgttcagctagcatgtttgtacctcataggaccacctgctctgcagggacactgctcacaatgtgctgggctctccagcatcgattagcaatcaagatgtccccagatatcttcacaggccaatgtgatggaggtaattcctcaggtgaggacccctcttcttgggtgtgtcaagttgatcattaagagccaccatcacagtgaagtgtgtttgcttgcagactaaggctaagggtgcatctttggtcctttacataattaaactgtcataaatgtgcatgagatattttttatgtgagaaaaagaatacataaccttatataacatttgaagagggggagatgttatgaaagtatcttttttctatctagagggattacttaaaaatcctgagaattttcttccttttttatattctgagaattttttttttaagattnnnnnnnnnnnnnnnnnnnnaacaaagttatacaaaaagtacaaaatccaatgcatacatatgcccaaatgttgatgttctactttagttcccccattgacataatacaaaactaccaagagaaagcaacttgtagaggaaggaatgtctttagcttacaggttagagttcatgactgagagaagccagggcaggagcacagggtagaaacccggaggcaggcgctgaagcagaagccacggagggatgcgggtgtgcaagttgattagccccacacagtaagtgtttgcttgcagcaggctaagggtgcatctttggtcctttacataattaaactgtcataaatgtgcatgagatattttttatgtgagaaaaagaatacataaccttatataacatttgaagagggggagatgttatgaaagtatcttttttctctctagagggattacttaaaaatcctgagaattttcttccttttttatattctgagaattttttttttaagattctgaaacatcttccttgttgaaagttaagttctttacatgtatcaatccgaccctagctaaacaacaacaacaacaacaacaacaacaacaacaacaaaatgcagggtttgtatttgtgctccactcaaacctatgggatgctctgtgacttccatggaaaacaagttccacactgcttggcttgctgtccacactgggaactgactcccagggaatctcagttactgctgtgcattgtctttaagattcgctattcccaccatgcccagcttcccatattggaacttgcatttgctcctcgggacaccatgttccctgggcatgtgttaagcactataaagtgctccaatacttcttacatcatgaccaggttggcccatctgtgtgagctggcagatcagctccttctcagaccatgacacacaatgtgcctgtacatcagagactctgaggatactcagagttgcccaatagttttacagaagaacaagccttgtttctagcttccccatccatacctcctcacaggctatgactgccagaagtgacattttcctcacttccacctttcagatgccacaattcctgacccatgtcccatttccttcttgattcattcccagtggtttcaattaacagtggccatgtatggaattttgaccactcaaatagactgttttctttttcttttaaattaaaaccatagcacatgccaagaatataacagacaatataactgggatttagaattcaacaccaatgggtagaaggacttaattaaatggtcttttagacagagatgcaatgtctctaagtctctcatcttattagcaacacagaaggactatgactttcttgtttgtctttctggaaccaagtactgtgcaaaacacatggtggacattccttaagtgtttgtaagatgaatagatgagcatcaaaggagggcagctttgctggcacagggctagtgtggactactgaaagggttcagtaccacagtggactgggtgatgggaaatggctcagacttaatcaccatgtacttagttcttccagctctttaaaagcatgtgaatgtgtgtgtgtgtgtgtgtgtgtgtgtgtgtgtgtgtgtatgcacgagcatggaggagaagactgggcatataagaatataagagtgcttccctttggatgatacacacttgcaagtccagatacttctactgtggagtaggaggctgaggaggagggatcccaagtttaaggcctgtgtggactatagagtaagttcaagaccaacctggatacacttgtgagtccctttttcagaataaaaagtgaaaggaagaccagggatatagctcaatggtcgagtgcttgtctagcttgcatgacaacctgtctgaatcctcaatcttgtcaaaaacacttttgccttaaggagactggatatatcctctgatacatgtcgagatctgacacttacaaagtatttcacttcctttagggttttgttattcttgttaaaatccccccacccccaagtcactgtcatactaaccttagcctaccacttaaaaattatataatgtgaactcccttccttggcatctcttctaatgctgcttgccttaaccttacagctccttgcgtgtccccaaagacacaaagattatagcaatgtgtgcatatgctattttaagaatagaaccatctctgcctctctttccctttccaaaccaactattgcttgaatgaaaaaaaattccatattgttgaagcaaaccattatttatcacctgtcaccatcaactggtgatttgtgattgcaaacatcattctgtgacctccttatgcacgtacacccataagccttggggaagagctgactttgttaacaagttatttgagttattctcctgactcataaacacaccatggggaaggagggcagagattgttacttcagttccagatgaagaaaacacagtaaacgcatgggaggagtagcctgcttgagacacaagcagactcacagctcaattgtaccagatccagatttcctgatcatttaaactgtggctggctcagagctcctttgatcccactccaacaaaaccacgagagatgttattgaataaatccaaaaccatgaggagaggggtgtaagcagactcttgcattgcaacctcctaccccaatctcaagaccaaattcatttgaaaggtatagttaggagcaaatacattaatggtgagaggggccagcagtggtaatgattgtcctgcaacggactatcccttttgcaatgtctccaatatggctcccaaagagtgtgggcgtggcttaggttgcctagcagcaggagatgtgcatactaaggaagccactcctctcaccctggagggaagtaggtatctgattaggatcagtcttaagggcaattctcaactggaagtaccagctttgtgattaaaattcacaggtgcattgagctgtcactcactcagagcataggagggaggctgggcaaaaggagaagaatgtggtgggaaaatcttagggagcctggggtgggactagggatgtgggtgagtcacgttccttgggtacagatgtaaagatgttaagaggaaaaaaaaaatcagaaaccaagataaacactactttaaatcaacatttagtgtatatcagtatatcatttggcagctaacaggctatggccaaaagcctctttgtaagtaagagtttacgaaaagtcaatagcagaagagccaagcttatgccctggtattaaaaatcctgaattaagcccagaatgtcagactcatgaaaccttagcctgagatctatgagaaaatatttctgaaggaaaagaacaatggatttgactgtttctgttatttagttgtttagagattctataacgagtgaccagaagctgagtgtttgaggaaacttacagcctcacaaatctggagaaaatgcaataccaagctgcggagcagagccaaggttgttctgtagatttcagggaggtagcccatctccaccctccggcttctcgtgcttcctgaacccatgcagttttacctgtgtggtcacctagcctcctccctgtggttgcctgtgtttgtttgtttgtttgtttgttttttctcataaagatccattggatgatatctactccagaaggtgaaaagtcagaacatctaccatgtccctgtttgcatggtaggtcctacaggcaggcagagtcaggactcgaacaaatctttcttgaggtacaaggcgcacctcaaccagctcgctattaggcagggacatttcacttcaaacttggcttgcaggagtggtgatggattggggaaacagacctttcataatttaaattcctaacgaaatgaaaggtaggtccattggggtgcttacattccagtctcgataattgacagcaacaggcctatgattctattagaagatctgatttccagtactcagctgataatgatcgggaaatgtttatactaaattatacatttcttttgttaacttttccctttgagtacaagcaatttattaaattattttgattactaccaagtgtaataaatttcagatttaaaaaaaatgtaaactcaccagctggggcaaaaatgtcctctgtcaaatctggtgctctgatttttagttacagcatgtggctgttgcacctgggaggctggttaaagcttctagaaacagtttgctttctttaagtggttcacgttcttcctgtaacctcatttatataaatgatttgctttctaaaaatttttttatagtggaaaggtaaaattgaattcagcttagcttaattcagattttttcttactgcatactaaaaataagcagaatctcaataaatatataatttggaaagttatttaggggactaaaatgttctagaatttggattaggtggatgcaggatattttgggtttcccattgtgggtgagaatttaaatttacttacatgcccaatatttatctactagtgttaagtctgaacttgtctagcgacagggaaatgaatggagttaactgagggtcttcagctctgagattcctataagagcccaaggtgatagaatcaaagaggaaagtatccatgacatttgaaagaaaagattatgtatttgttcttaaactataaacaaaacttatcattttctccaattaatagaaatcaaagacatttcataccatgttgtactattgtcactctttcaggaagcactcactggtgtttaaaacttgtagttttaggtccttgactggatcttgttaaatgggctacccacatcttgcccgtacagggcacatttctgatttttttttgatgattgcatttcggtttagttgattttctttgtagtctcatactctttgtgtatttaaccatattgttcctagcaagggttctaggtcttcattagactgcaagaagtgatcatggtagtctttagcttccagaagctccttagaaagggatggggtctcatgagcaccccttgtccatgatggtgttggaaggcacatgcgtgggttttgtgacagtactcatggctgctgtgtgcacatgactgtaaccttcatgtcctatccagacgagtgttccccaacactgctccgcatcctctgccacacacagtctgtcctcctcttccacaatgttcctcaattgagggggtgatgtgaatgccctgtttggggctctgcaaagagtatttttaatgaaacatattcatttctgtcttcttgcaaggttcctctccagggcaccgacctaacaaagtatgattgctttgtcagcccacaatcagtgcagaggcaggtcgtacctccgttcctggttcctttttttttttccataaaattagtaattccccattgttccttctcaggcctttatcgtatctccagaagattccgttccaacagtcttctgtatgtgctaaggcacatgagtgctattgtgaagtcaaccttacacgtctgcaatgaggatgtctgcaatgtggagttctgctgaagctccggtttcaaacagataatcatgaaagctaattatgtcatactttgtaactgttgctgttcttcttaattttcccacatttaaaactattagaattttggttagtaccttctgcattcattttcttattgctataaccaaatgcctcttaaggaaccactaaagagacggttattttaccttatggtttgagggaatagagtctattaaggagtagaaggtatgtgagcatgtggccctgtggcctctggtcaccttgcttttatactcaagaagcagggagtgggcaggaaatggagctgggctaccaaacctccaggtcttcccctgaagagatttgcttgctctagcaagactccacctctgaaaagtcccttaactttccacaatagctgaggaccaagtgttcaaacacgtgagcctgaagggggccttcacatctaagacacagctccctcgagtttgtagcttctaaaacagactctctctgtgaatgaaaagcatctgctttgaggcatatcttctccaccccatctgtgaaggtgaatggaaagaacgtacttagttgtgcatggttggagtcagatcatcaaagatgtgagctagacttagtagcaccggaaggaaagaagaaagtttataaggtgccctctctgtgcccttctgtatccttccaaggtttctaacctacttcccggaagtccttgtgcttgagggctgctcttgactttcttgcttagaagcttgctgttctcatactacattctctctctctctctctctctctctctctctctctctctctctctctccctttcctctgtctctctgtttctcttcctgtctcttcttccctcccttcctccttccttttcgttctctctgtctctctctgtccctctgtttgtctttgtctttgtctttgtctttgtctttgtctttgtctttgtctttgtctttgtctttgtctttgtctctgtctgtctgtctgtctgtctctctctctctctctctcacacacacacacacacacacacacacacacacacacaaatcccttactaggacatttttggatcttagttaatcccagatgtagtcaagtcgacaaccaagaatagccatcacaaccaccaccaacttggctaacacagattggaagacttcaaaggatagtggccgaagtcagctcggccgatgcctctgactctggttgctttagacaggagcaaacttctggctgcttcagttatcggttgatagtggctcctatgattaggaaggataagtggcttctctcggctttgccagaaccaagtggtcatgttcgcggaggagtgggaacactaatttcagggatttgactctggtacaaagcccgagggtgcgatgttgctctttccttcggccctagtaaacatcttatgctcggtatggtggttgaattgctggattgagtcttcggtttcagtgccaggaggttcacagtaaatgagaggtgtgggctcttggggaagagtggctgtggcctggcctcctgtctgcaccctgtcaataaacacacacacacacacacacacacacacattctgcaatgcaggtgtgcatcacagggaggggttttctagagctttgagagctgctaggagaaacgggccgaggtgtgggtccagggaggcaggaggtctggagaaatagaacagagccgagaatgaccttttagctcctaccatcccataatcccagctttcccacttctgcccttatttgtgccataatcaggacacattaatttagttccaggccaggtacacgcagggctgttcaagtttggtagtgaactagacacacatgaattttacctttcatttttttttaacctgatggattttaactttattccataatttattaccaaagacaattccacatagtttatatttttctaacagtggcaacctatctattacatcaatgtttattttttagcacagaacaatcaacatttaaacatttcgacattataagatgaggaattttacctttcatagcttaactgtggagcaatttgaatgaatagcagctgatcaaatcattagcacctgctcagtgtggggctgtgacagaggaagtggggagtggcctagggggggtccatccctgtgaccaactgccaatacttgtcctactctgaagtcagatcttttaagcatcctcttttcttcctctaagtctccttccttgcgcttctcatgctgccccagatttccggctcttcttttcgaagacctctctcacagatcagcccctctgactttatagtccccttaggcgcttgtcttggcagctgctggctggacacctgtgtcaaaggtagatcggtgaagcacgcactctccattgtatcccaccttccttttctgcctctgacaggtttatctgccttgtcaccctagttgtaggctttgtggtgtttggcttcccatttctgccatccatgttacacagtcacctccttcattcgtacctgccctgtgccgcttctctctcttgctgttcatgtctcaccagtaacattttgggggatctaggacactctgcgcagccgcagttgcagtgccgttctccccgcggttctctgttactctgcggctgtttctggtctctttagctcaggggattctccttcggaacctccagagctcacgatttttgtcttcagagcttgtctctctgtcactagtaactttccagcggattgttgctgagctctgcatgtagacatctggtttctaaacccggcactgcctgcctaactcctggttcacctgggcatgttcttaatcacgtgtgctgtggtcattctatctgtgaactcaccgtgttcctctcatagagcggtggcggggatgaaatgagtcagcgcatgtgcagtaaaaagtgtctgacatcacagcattccgtggtgcacttcctatttgtcttagggcttctagtgcagtgatatagcagcgtgaccaaaggaaactggaggagcaaagggggttatttcactttgtgtttccacattacagcccatcatcaaaggaaggcagagcaggaacccaaggcatcctaggatcctggagtcaggaactgaaggccatggaaggatgctgattactggcttgctttccgtgtggctcatcctgctttcttataccaggaccacgggcccagaaatggccccattcacagtgggatgtgtctcttcaatccttaatccagaaaatgccccacagacttgcctacagacagtctgttggaggcgttttctcagctggggttcttctttccagaggactctaacttgtgtcaagttgacaagaaaactagctcagacactgctaacaccttgcgtttttgcttttatgactgattactcagtatatttctgaatcgtttatagcattgctcataaaatagttttctggatccacatcatatcgctgactatgcttcttgcgacaaccaaatacctgcccgaaagcaccttaagtgaggtgaggattatcttgatcatggcttaagggaatccagtccttcagtggtaaggaaggagtgctggcaggtggctcgggtggtggcagctgcttgattccatcccatcagggctgttggcagaactggagcgggaagtaagggccaggctagaaacctcaaggcccactctctcagaggcccacttccaaggctaacccccatccctcataggttgtaagccctccccaaacaatgtcatcagttggtgtccaattgttcaaacatacaagcccaagggggggacatttcatatataaaccacaggnnnnnnnnnnnnnnnnnnnntttagccttctggcttgctaggcgtatagagtcaagatgtcctcagtaaggttaattttgttttgctaatatgctccgcacaaagcaggggtctcagttaggggcagaagagagctccttggctggacaggaagtggtagatgagagccagaaggaaacagcatggttgtcaggctttgggtttctttggctctccagctgccactgtcttgttatgtttagtaaaatgtgaggtttgtgttgtctctaggaggacagatgtacacttttctgatgtcctttaatgctgggtgtggcaagggaaatggagacaaggtattatctgaaccaggaaccctggcaaaactctgctctcccgagtgtgcccagtggccttatcttgagcaacagttggggccaccatggcagtaaaatggtcctactgctttgcattgtctctcctggcttctggaaggcctgtgctgctttttagatgtattctcataaggtgctgagaacttgcttgttagtcaccaaagtgactgtggcagattaggaatgtgtggagggtgccccaagtctttatttatttatttttagttctatatcatgatcatcttcatcatcatcatcaccactttggtatgtgtgtagcgcatgcatgtatatgaaggtatgtttgtgcaggtacgcatgcccacacatgtacccaaggataccagaggttgatattcgatattttcctcagttgctctccaacttattttatttcttgagacagattacctcactgaacctgcagtttactctttgggctagactgactggccagtgagccctccaccctcatcctcctgtgttccctcccagggctggccttaaagatgggtaccattgagacctgtgctctgttatgactgagatctctggtggagatgaggcagatggctggagaccagaaccagtggagtgtgcctaacccatcatgggggatgagagtgggttttgtattttgagacctccttcagcagttagggcctgagaactgaatctcaggatggaaagggaggagtcagagtagccccgtaagtattaatgggccggcactgtgtaacactctcgtgggtgcccttcctgtggttagggtaatcagctttagctaaccatctggtgttttcattcacagtcttttggaactgcaacccagtgtgcgtgtttccagggcgactcagttcaatggggggtnnnnnnnnnnnnnnnnnnnnaccttgcgtttttgcttttatgaccgattactcagtatatttctgaatcgtttatagcattgctcataaaatagttttctggatccacatcatatcgatgactatgcttcttgtgacaaccaaatacctgcccgaaagcaccttaagtgaggtgaggattatcttgatcatggcttaagggaatccagtccttcagtggtaaggaaggagtgctggcaggtggctctgtggtggcagctgcttgattccatcccatcagggctgttggcagaactggagcaggaagtaagggccaggctagaaacctcaaggcccactctctcagaggcccacttccaaggctaacccccatccctcataggttgtaagccctccccaaacaatgtcatcagttggtgtccaattgttcaaacatacaagcccaagggggggacatttcatatataaaccacaggatttgtctttctccagtcacatacacacaaacacacacattatgcacgtgtgctatttatatgctaaacacacacattatttgtttgtaggctttagtttttaatcagatcgacattttgatgatgtttctaaataaaagatttagacaagtctccagccagtctattattatgatgagatatgaactgcttttagcttttacttagtgtgtaagtgaatacacagcatgcatgccatgacacaggagtgtaggccagatgacaacctttggtgtcagcctttgagctcgatcctcttgagacaaggtcttttctgctgtttctcatgacatacccaggactagctggctccaagttctaggaatttccatctttgtcttccatcttgcagcaagaactcaaggacaaagggggctgtggcccgctggcgcctcgtgggttctggaggattctagtgtaggttctcactcctcttgctcagcaagaactttacccattgagccatgcccccagcccaagatcccctccaccagtgtgtgcttattcttatgaaggtgtgccgtgctgactggtttatgtgaaagtttgaagtgggcctgatctcagggcctctctgtcctgtgaaatgagcacactcggagacatgtaaacctcagagatgagctcatgggagcgatttctgcaatgaaaatagtgatgtgagggtgtgccagggacttcaggttcacagagtataattagaacttttttcaaatcactgcccactgtaatttcattgttatgtatattctttaattatgggctctaatagtccagtttagttctgtaattaggtataaggacattaatttcagagacataacaattggctcaaatgtacttctaaattctttcccatatcctaccttacaaggaaaattaatgcgccataaaattttgtgcaggaaaagagcttcccagagggcagcttcgaggagcctgggggcttgggttcagggaagacatgagactcttaccttggctccatttccctattgaatgtttgtctcatttctgataggccaagtcgagactatggtggacagagaagaacccctcaattcacattgaatctgtatcccttaactggaaaacttagtgacatcaaagcctgatgagtcccggggaaaggaaagaacagttagggcaactgtgcccatatacaaataaaaatcatgccggcctcatgaagctgaatgcaccatttttttcagcaagttccaagggaaacaagtgggcctgtttcatcttctacagtgtcttcatgtgtacccattgaccccattcgtaactctgcccttctcagcctccagtgaccccttttaaactctacaacaaactccttatttaaagcttccacccaggaaggggaaagtgcagtctttgtgcctgacttctttttattaatgtcttccagttctagctaggctaccttgaataacagggttccatccctatcatggaagagtattttattgcatgtatgtcctacattttctttatccatcttttcatcagtggacattggggctccatttcttagcctttggggtgcaatccattggagggtgtatagtgtctgaacacactggtttccttttttaagttttgttttctttgtataggtacccagtagagggatagatagctcaatcatgtggtagttctggttttagttttttgaggaacttctgtgatgtttccataagttatcagttcttatgaacacataatttataatataggctttaatatataacatataaatataggttagagtttaagctctgcttctgctacttactagtctaaaggtcaacgactgcagggcgctacacagaggtgatttttatttgctaattacattgcagtgaggattcataaatctactgtcagtgtcagaaaccctcaaaactcatttcttctctatgatcaacttagctgtgagagacaacgaacacccaagcatgttatcgtgtgtgctgtcgtagaaggaatgctgcttcctcaacaagaacatactagaagattctcatgactaaagggtcatgctgggcgctggacacacagagttcatagggtggtagagacaggcaggtagatcagtgagtggaagaccggaaccagagtctgacaccgcacttaaccacaggctaagtgttatcatgggaaacatttggtcagttctccagggaccatgatgatacatgagaatgttggccatgtcactgtgtacaggaaggtttctctctgtgtgtgcatgagtgtatacttgtgtgtgtgcacacgtgtatgtgtatatatgcatgttcatgcatctctgtgtgtgtgtgtgtatacatatctaacttgggaatatggggacatgcatgtgcacagcaggcatgaatgaaagtcagaagacaatctcaggtgtcagtcctcaggtgactcccattttttgttcgagacaaggtctgtcactggcctgggatttcaatgtgtaggctaggctaactggcccctgagcttctggagatctgcctgtttctgtctcccatttcactgtttctaggattgctagtatctaccaccatacttgtctttttatatgggtttaaggaatccagactcaggtccctgatcttgtgaggggtcatctccacagcttgagcccctggtaagcttactaggcaaaatgagagatgagcaaaaacccacagcctggagatgactggtggctttaaggaaccgcatcttccaggtctgttgactcatcaatggatatgtgggttatttccatttgcactggaaagcataagccaggccaaaggcttgcacactaggcacctagctgatatccatttaataaacagataaaaagggctgaaagaaagttaggatgttggaaggagtggnnnnnnnnnnnnnnnnnnnnctaaggctgcgtgtcaaagtctgtgccgctaccatttatgtccttaggcttccattcccatgatgcatcattcttagttctctgtttcctgcctaagttgacaagtccatgcatttctctttggaagtcaaagggcaccatactggttacaagggggactgcttcctctgtgcacaagggtttttcagtcaacctcacagagcaaaccaaaaccattatccgagaatcatgtctagtttgggtttgatccagccctggataatgtcagctgggcccaggggcacatgggaatgataatatctcacttgagacccattatggagactgagactctcctcccttaaactagtgcctttctcttttgttccccaagagttcagacaggatactttctatgcccggggaagccacgtgcaattatgactattacagggggggggggacttcaaatatgtctagacttcattcctttcagctccgtgttcactacgatggcaaatttaaacaaaagagcatggaccctccctctccagattgccttgcccaaggctaacattcaatgaataatttatttgttgaaggatcttagctgactgctcaaggcttaaataaacctcatgaatacatctcggttgatgtttttgggctcttggtgtcttctcccagtgggattctcacattcatgggcagcctaggagaaagaggaaaccctgaggatcctgttctacatgtcatatttctccccatctgacttgccaccagtctccaagttagatgattcatccacaaagtctttatttaacatcctggaactgaacagtacctccctaggagccttcaacctcatcaaccatcatcatcatcatcatcatcatctttcagcagcagcagcagcaagaatatggggctcagccctcttagagaagcctttgttaccagtgaactgtggtgaatgcagaaattcatgactgtataagctgctacaaatggtcagccataaacaagattcttatattatcccctttaagaccaagggagcactgcagaagaagggagaggggatgggaagaatataagagctagaggacaggaagagagaccatgaaataccagcttcaggcaataaactctaaataattccaggtgaccacatggggtctgcacaagaacagacccatcatcagctcagtgtatatggaggtggggcttgagaagtcctacctgtcactaaggaatctatttcctaccaacagactccaggaaaggagacgtcattaccgtcactgtgtgccaacatatgacattaccaggttccaatggagaattccaatcaaatggaaatgtagatggctctctggtcaaagcaaatgggacataaaacagaatcaaaggtcatgaatctgtcaaaggggccagtagggaggaggcggcgatggatgggtgataagagagggtaagggaggtttggtaacacaagtgcagtatagacatgtgtgaaactgtcaaagacctaactaaactaaggaaactcttggggtacagatttcagttctctagcggctctcttgctttttgagactccccctgtgctcaatatgaacttcaccggctcaccttttagctttcatacgtatttgaaatacaactattcatagtgcctggtgatttatatggtttctatacctaataagtcggtgcctctctaggctcacgggtttaaacactttatccccagttagtgggactatttggaaaagagttgacagtgtggccctggtgaagaaggcttgtccttgggagtgggcttcgaggtttcaaaagagaggttcccaaagacttctacaatttccagtgtgctctccccacctgctctgcctcctactttcaaatcaagatgtgagttctcagctgtccctttgctctaccatctaggactctaagcttccctttctacctccagttcctggaatgacaactctgagactaattatttactgttaaatgcctaggccataagctttggctcattccctgactaactcgtaacctatttaacctattcaaactattataactttaccatttgcttagttacctctccttcagtcctgcctgcttccttcttcatgtctcttctgcgtctctctctcagcatctccctgacttcacctacttgctggtttatgttcatctcctaggtctgtctctcctgtcctcacctgaatctcccgtttagactctcattatttcccagaatcttctcttttcctgccagtgtcacacctcctatttcctgccgcagctcattggccatcaactttttaattgacaggtggtgcttataggagattctctctacactaaccctccgaaactaagcctagctaaacgctttcttgcataagttgccttggttatggtgtttatcacaggaaaagaaaaagaaaccaatatggtgcctgaacaaagacttaaaagatcattcaaaggaaaccataaagccatgaagaatttgggtaacttgtaaggaagaggaggaataaaattggtgaacccccaaatcagtatatgtcactttggggagagacacagccatgtggacaggtctttctaaaaatcatggctctggagccagactagctgacagtcatgtgatttgggtcaagtaaacaacttctctgaccatagtttatttatgtgtaaatcagggatcttaagacccctgtcttagggctgctgtattaagtgaggccttgcatgtagaatgctaagaatagtacacggcacactgtaaactctttcaaatgggctattgttagcactgagatgctgcagtgctgagtgttcctgtgccagcaccctgctaataaatcctctgagtttattgctaaaaactgagccttgcagaactttgaactgggaggaagcggagagatagttttgtttactcctctttcctagatgaagaaacatgggcctagggtcacagagtaggtcgctgaagaattcaaaaatagtctctgtcgattgcctgggacacctttcttctcacaaaaaaacacacatccagagcctgtggccagtcttctagaggtctagcattcccctaaagacacctcctcacctacgagacacttttggctaaaactctacagcgttgaatcatgcccaaagaccagctaggtggggagactgtctcctgttctccaggctgggctgggtgcagagcaagggcatcttgaggtaacccgggcagaaggagaaacatgcgtatttgccggaacacacatggacagtgtttaaagacaggagtgtggacatgtttctcttaggctggttcttacagggctgagatgtgtcagagtgacttgtatcagcccattgctgatggctttattcactttcaatggcctcagtggccttaggcacattcatatgggatgccacacagaccaatgaacttgtttacaaaaatgtgtacaaacaaacccaaacctagagaaggctttactggtggcaggggaagattttgctcacagccaggaaacccgatgcatctagtcatcttctcttaacacactgtgtttgcaaaattgagaccaagaaggcaagatatttcaaaggaaactcaaggtcacccggggacttgttgactaacctcccggaagtgattgagtcttttcgagggacggagtcttgtgttcttcccaagtctgcatctgtttgcttttgtgattgaggatggaaggatgaggagaccagaacactgtctgcagccaagaggtccagactgaaaccagaactcacatctgggctctgcgtcccctcttgctgggtgaccttgctgtcttaaccttcctggatctggtatcgaaggactgcctatctgctcgcttaatgtgcaatctgtgctcagggaaatgttcacaagggtcagatgtcactatatgaattttgtttgtgatgtgggacagatttctatgctgtgagcagactgagtgtctggctgagtttcctcatgtgtaccaccaggtcctgcctctaccctctaatgatggacatcactttccagaccattctgaccttctctctttcacgagtttggttgctcaggcttatgcaaagactgtgttcatgaagatggaatggtaggatagcattttcctttggctttgttgttataacaaacgacctagatttgtagccaactgacaacagaaatacatttttttccccatttctggtggtatcagtcctagattgaagtgccaggggacttgatatctagtgagatcccaccttgcctcctggttgaagatacagagccctcaaccaggaagaaggtctccggtttcccgttttaatcttattcagcggggctttgcccctgtgcccctcattgttttcagaaggctgcagctccagtatcttctgttgcagatgtgcttcgagagtgtgaacttgggaagggataaacactggagtgaagtacgcgtgggtagcacgggtctgctttcagcagaggagagccatgaattgtatgcggacctccgtgcctctcctctgcgtcatcttaagagctgcttcatttcaagggaggaaaggttaattttgggtcctcttgaaacatgcaggcaatgcctgccaaatccaggatagcttagagccacaacctcatgaggggcctggttgggtctgtgtgtctgctttggatcagccccaaggccttgccctgattcctgtgtgagctcctccctcctctttcctggagaaatccacagcgaggcagtgaggcgagggggccagtgtttattttggcctctctggagctggactctgctgctctgtttgcctaggatgaagtttggtccctcctttttttatttggccagagactcaacctcaatcatttggtccgttggtgattttagaccagatgttcaggctctttgggacagggagaagggcacaggtattactcctgctcaaacctactaggaataccaggtagttatcctaaaatccatggctgcaggcactgtcaggcctggagaatggaccttcatttttctttgaagtggggctggagctcagtaagcaggtggacctatctgggcagcatatgcctagctcaagcctgcttgctggctgtcttgggctggccaagtgactagatgtaagcaagggctctggagccagtctaggctaagggttcactgcttcctggatgttaaacttgaaaatgattttagttctctgaatctcagtttcccttatgaaatgattgtattttgacgatttgatttgaaggattaaatacactaatatgtaaaactgaaagacatgaaatttgctttcacttataagatggcaaaggttaatagaatgctttaaaaatgtgatccagctacgtgttgtatatgagaaaagtctttgagctataaggttacaggtatgttggacaaaaaggaatgttttgaatcatataggtattaattaaaagtcttcaataaatattagcaaattgaatgtagaaagagattgaacacattcagagtgttcattccaagcatacaatattggctaaatataaaaattatatgaccttcttaaatgattcacaaaataatttgccagaagtcaaaaatcaatcattggaacattcaatgaaatctctccttaagtaaagagtagaggacaattacttgataaagagcggctacaaaagtctacagctcactttgcatatggaaatggtgctttcttcctaacactggagtacaaagacacctgcctgtgttttctttccaacacagtaccaaaagttctaggcattataaacacaagtaaagatctatgaagtaccccactgcttgagctgctaatgtgctcagaaagctaaaaaaatcaatcgtaagtctatgtctctggtgagtctaagtcacttgacattttctgactcaacttctcttctaccagaagaagccccaccctcttccttcatcctttaagagtaaagaactctgcacaccaaaacacttaatatgttgagcaaatggggctgtgccaatataggggaatgccagggccagggagcaggagtaggtgggttgtggagcagggggcggggggaggagataggggatttttctgagaggaaactaggaaaggagataacatttgaaatgtaaataaagaaaatatctaattaaaaaaaatctagcttttccccccaaaggttaactgatttactgactgtcattctaaggaagaactttattggaaacgcttttgtagaactactcattgtttttaaacctgtgcttagaaattagctgctttgtgttggggagagtttgaagaaggagatgggggtatacaaattgtattttattatatatatgtgaaattctcaaccttaaagaaaaataaacaaaaaaagagaaaatattcaattttaattcagtctaaatttagactgctaatcaattaaattaaaatttcgtgccaaaaaaaagagagagaaaagaaaagaaaagaaatgaaaagaaaagaaaagagaaaaaaggaaaagaaaagaaaaagaaaatggggctgtgtaaatcttctgaagtcagatgccaaggacgttggcatacattttcatttcttttttcctggctgatagtggcaaatcttctactgtccttcttgaagagcatggaccatggggtttaattttagagagctgccttgagaattcctgaagactcaaagttcatggcttggctaggtaacttctgagaatgtttggaaacaagagagtttatagcaatttaagggaggctcaaagatgcttgtttctgcttgtgtgggcaggaagatcttgaagtgatccaaaacaaccagccaatcatgtaagatgtcgacaaagataacgacatgtaaattcatagtatgtgagcccttaagatcttcaaaaaccacaaaggaatatggaacacacacacacacacacacacacacacacacacacacacacacacacacacacacacacagctagctccctcagcaccagtgctatcttctgaggctactgtaataaatacttatggttaagatcaagcgaggaaacttgaagcttaaagctacagcaatctctaaatcctcaactaggtcacactcacgaggcactatagcaaagtggttagaagtatggatttctgctggagtttagatcctactttcacctttgttagtgccgtccttgacctgttgtttaactgtttcctgctttggtttttggcctcaatatcattatgttaactgtaatatctatctcataggattgctgggggaaatctaaagaagtcagctatactcagcttttatgcatgaagcagaggggatatatgaatgcaatctaatctatttgtatgatgtatggcgggggtgggtgacttttgcttttaagtactgtcttcataaatcatgtcatgatgctactgtgacggtgcccatcccccttcttttagtcactgaaacgtaagtatgtctcagggccaattaacagaatgatttataatccattagattcgtggggcacttcaggccttgggtctcctcccagggctcctagtaacaaggtgtacagttatagatccgtgaactggtgtccccgaaccccattcccatctacatattgaggaagttaacgggtgcctgctgaggtcctttgtttcctagaaggcagcatacttctgaggtggagaagcagttttactgacagggacaccgttgggatctcctaggaacaaagtgtcctctgagaacatttcagcagtggacagttttctaagccctttccattaatgaaccattggagcaaatggtgatgaaggcacatccccatcctcacttaggaataagggaaactgaggcagacagaagctgagttgcccaaggttccctgatattaaatggcaaaactgggatttggtgtaccagaaatcctgttctggaacagacgggtaagcaaagtgacgggtaaacaaatcaaagggccaggtcctaactgctgcgtttcctctatggtcctgtgctatccatagctctgctaggtactcagctgacacttagcatcctcaatgatcatagacatgtgtttagctaaactgattttagccttctggcttgctaggcgtatagagtcaagatgtcctcagtaaggttaattttgttttgctaatatcctccgcacaaagcaggggtctcagttaggggcagaagagagctccttggctggacaggaagtggtagatgagagccagaaggaaacagcatggttgtcaggctttgggtttctttggctctccagctgccactgtcttgttatgtttagtaaaatgtgaggtttgtgtcgtctctaggaggacagacgtacacttttctgatgtcctttaatgctgggtgtggcaggggaaatggagacaaggtattatctgaaccaggaaccctggcaaaactctgctctcccgagtgtgcccagtggccttatcttgagcaacagttggggccaccatggcagccaatgctttgcattgtctctcctggcttctggaaggcctgtgctgctttttagatgtattctcataaggtgctgagaacttgcttgttagtcaccaaagtgactgtggcagattaggaatgtgtggagggtaccccaagtctttatttatttatttttagttctatatcatcatcatcatcatcatcatcaccactttggtatgtgtgtatcgaatgcatgtatatgaaggtatgtttgtgcaggtacgcatgcccacacatgtacccaaggataccagaggttgatgttcgatattttcctcagttgttctccaacttattttatttcttgagacagattatctcactgaacctgcagtttactctttgggctagactgactggccagtgagccctccaccctcatcctcctgtgttctctcccagggctggccttaaagatgggtaccattgagacctgtgctctgttatgactgagatctctggtggagatgaggcagatggctggagaccagaaccagtggagtgtgcctaacccatcatgggggatgagagtgggttttgtattttgagacctccttcagcagttagggcctgagaactgaatctcaggatggaaagggaggagtcagagtagccccgtaagtattaatgggccggcactgtgtaacactctcgtgggtgcccttcctgtggttagggtaatcagctttagctaaccatctggtgttttcattcacagtcttttggaactgcaacccagtgtgcgtgtttccagggcgactcagttcaatggggtttgttttggaaacctagactgagactgactcagtggctgagttcagcattacgactatgaaggccgggaggctgtctccaaagcctttgccttgggactggttctcaggggcttttaggaaagggagcacttgaactagaccttatcagaggtgttctgtgcgcggtggacagtggttaaaacagacatccgtatctgattagagtgtagagagtgctcagcttcatagggagtgtctgtatcctccatgtccaccctggctcagaggtcatctctgaagaggggatggaaagattgtaagagccagaggttaaggaggacaggagggaaactgtatcccagacatgacaggatcactgcattcatgaatgcacagtagctctggttgcttgcacaagacccgcacaagaccaagccactcaacattttagcctgaatgctcacacgctcccagagatagctgcggagctatttacagttgatggtttcagagggagagagaactagattttttaaagggtgtggtccctgctaggttggcccatgctctggggaatggccgcacacctagaggtctatgggccatataaaattggacttggtaggttattaaagaaaacacaaagagggcaggaagttgggaggggcgagaatataaaagtcttgggagaattaggggtagaaaaacaagggaatatgatcaaaatacaatgtatgaaattttgaaataataaaaatagtctatgaaaatgaaataaatgagacagtatatttcacagtggaaatattagcatacacaaatggctgtccatttgttctgtccagtgtgacacttcttttctgtcttttttcccccttccccatttgtgtggatacctttcccaaccagtgtaagtggtatgccaagccaacttgtctgttttctgggtactgcctaagtgtttgcccatgttaattcactcaatactgcaaacaccatgtgtggtaaaatacaattgttatattttattgatatggcaaccggagatatgattcggttaaagatctgcctcaaaataaacaagaagatcaggcaagattggaaggcagctccaaaccccaggctcttaaccacaaacaacactggccccataaattctctgagtttattgattttaggctccgttagctggggaacatttacacactatctctattaaaaaaaatccgcgtgggttttcaatctgcctgcaaggagactgctatgactcaccgaggaggggcaccagggtgcgtcagtagacacgagtcccatagctgtcctgggctgaactgggttgttgcttatgccagagctctggctggagaagtttcggggaagtaccaagtgtgcaggggtagcatgcgagtgatccctccacacttgcctgcccgtcttagtttggctggatctggatgatgtcgtcttatgccaatggattgtaataagtcatttccactgatttcgaagacttggtcccctagattaccctcaaatgttctccaaataatagcctctacttctgatgtgtggcccaggttccataattcaagcctcttgtcacaggactttattccagtaactagtgttggctttgttagttattggtacatctcttcagctcggggtcaggactgcatgtggattcggatggtggccctggctctagttgtgatgtggtctgttagggtgaccagtcaatcccaagacaattccactctccagcatgcagctggatttacggaaactcacacgacctctcgaggctgtttattatgctggcgacggctaatgcttgcacttctagcaagtcaccagtgtttattccttgccatgaccctatggggttactgaaagttccaagtctcatttacagtcaaagcagcacaagtgaagagtgaaagatatgtgtatttcgtctgataagaaacaaagagatgagtcagagcttaagctgagggagttaaggtgtagactctgcgctcctgactgccaggctggctcaccctggtaggcagttggggctttagagtgcagacaaagcactttcctaaagagtgtcttgttgcatttaggttatttacattttcagtagactttggtttttattgaagttgataggctactagaaaaaaaatgcaatgccatgcataagcaattctccaaggtttgtctttagattaatttttcaaggggtttagcaaggacacaggacacaggatgtagtcccaccttgtcatatgttctgactgcttccaagggggcaaccatcttatggaagaagaaatcgaagttcaaggatgttataaaagccacttagagccatccagctggcaagcagggggctgtttggggcagtctggctccagacaccatctttctaattgcccattcttctctccagtgggagggtttctgggcttgggtttgggacacgaaggccaactcttcctgaggctgactcatgcctcttcatccatttatccaatagctacttctagcagacctactgtgtgctagagcttgttagttctggctatttactactgtgatacatgtatgctccgcctaggttcttccagatctcattgttggattttcagtttctgcctctgtaacagataagcatgaaaaacagatgagtagttctcacccttttggaagcccgtgcctgtcttatttataaagatacctataaacgtagcttatgccgtccttaatgtttttctgcaatttccaagtaagtggcttatggtgactaaaaataaaatgagaacaattctgatgttgaataatttttgtttgaatcacacaggccctcgtctctctcccactctgttccccatcacagccttcattcttttcattaagaagccctgggtgctattctcacgctaaaacaaagggatctaccgttatagctctaactgctctgagccgctggggttgcgtctgtttaatttatattcattctctcacccagtcctggctttggggactgtgcagcaaataaagcattgctcatttcttttactgaaaacctcatcccccccatgggacactggtgatgggaatcatgtgctttggagccatctgacatttccccatcctgtttggggagtgtgcagcgagggacatgcccaggactctgacacagcaggcccacaggctctttgctcaagggccttatgagttagatgtgcttttggcgctaggaaatgcctgggctgtttctactctagactttcatgggaaaggctgcttcacggacctcttagggacagcagatggcttataaatatctccggaggtctgggcttctcacttagtaacgtgtaactccatgctgttcttgaaagtcttcgtagattcacttgtaaagtatgaggagccaatcaccatggacggtaatgagcagggtatactgattgtattgcaagaggagagagcaggggcctcatgattatcactagaggaattttttaacctggctttttagcttctttaaagacttttttaagtgtgtggtgtgttgtgtgcgtcgaggggtgtgtggacacacacaggagctagcgcacgagggaaggcgcttgtgtcgtctagagaggggattgattggatccccctggagctgaagttacaggttgtttgtttatgagtgcctgagatgggtgttcggaactaaacttgagtcctctggaaaagcagaactgctgagcaatccttctcgcccatgcctggacttttaaaaacagtgcaatgagttgttaaaaaaaaaaatacagtttttataaacacaagcttctccacctgtgctccatttcctgaataatgactcagaggtttattaataattataatgctatgaccttaagcttaggctctgccccccccagcccccactagcatgtaacgtacgtaactcatttattatagtctatgtctgccacattgcccgttacctcttctcagtttcatgcatctgacttcctcagagttctgggcgaatcctcccacctctctctagcgtgcagaataccaaaagagttccatcctctatttcctgccttttgctaagaggccatcagctttttattggtgatgcttccatacagtacacaagagagtctctctatgaattttctcaacaaacactgacataggtacatgttttgtgataagcatcaagagatgggtgatgctcataactggggttatgctggcaatggttaaagaatggatcctacagaagaggtactcagccctggtgtgtagctttcggcaaatctcctgtgtgcgtactctaatcatggtgatttgaactactgtcatgatgtctgctgtctgccagaatctctgaatatataagaatcattacttaggagcctgtaaaagctggtcctgaaccttcagccagtgtttgctttcagagacagatgaacagatagaaagtttctccaagggccagtgacttgcctatgtggtgaacacatccaggtggttcagactaacgcagctgggttagtaaggaagaattctagggagagggagacagttacctttcaaaacagtctctctgccttcaagccaagagaaaaggcgttggactggtttcaaggttcctggcagaccagctacatctcaccctcctaggttcgttcccacactggctgatacaaaccttctacgctggccagcccaggatgttgtgtccagtcctgagcacataaacttctcttgcttccgaaggctcctcattcagaagatgctctccctccatctccatctccctgccttgttcagccttcctgtgcacacaattcccactctcagacatgaaaggaaaagtgacacagtggactgtagtgaagtgaaccatttgggttcatcacgttactgttaaaatgggaaaggaagatggcgtaatcaggaggtatggatggtcctccattcaatacgggcctgggttcaggatgaccaagaactctcccaaccacatatagacaagagtaagggagctatagagtaacaataacagctgtcaataagagtgaaaattggtacagtctttccataagccttttggtagtatttattaaaattatgcatgtacacactaattgttcccttatataggtaaaaatatggcacgtgtgttacctaaaggtttattctagactgctccttcatatgctgtcattataaggattccaaattgggaaaaaccatatgctgatctataatagagagtaagtcgtggactagtcacaaggtggaatgccatacagctttgaggaaacattgagtgtcatgctatgtgatattatgagtgtatctcacagatgtaattgtgagtcagaggggccagactcaaaagaatacaagtgaaaatttttgtatgcaaaattgtctgcctgtctgtctatctatctatctatctatctatccacatgtacatgcacacatacatatacctatacccatatatacatactgtttgcctgcctgctcactgtgacattagttttaccccagggctcaccttgggtgctgttttcatctaggaagctactctaacaaacacttctgaggttggtcagatactcatgggctggcagcatttccccagagttacctccttatatcattctgtaattacttttctgaaccttccactctactctaaagggctgaacgggcagtgactgcatcagtttgtattctgggtatttagcacagttcctggccctgagggattgatcactattaaataattgcagagggaggtctctgtattgtgtgagagatgaagctttcaatcacggtgaggtacgagagtgggagaaagttaggtaggggcttgtcacttgtctgaggtgtctttggaagttcacttcaacaagtttaactgagttgtaaagacgtaagcatcagatactctgctcatagccaccactcactgagcaactgctacatgccagatctcaaactgctggaagctgactgtattgtttaagtctaatgatcatcatgaggggtccacatcgtcatcctatcttgcaggttaattaaggctgagagagctcaagtaatttctcctgggtcacacagcaggtcagtggtagcactgagctaatgaacccagtgcttctggcttgaaatgtaccagagcacatgtctttaggttctacatctctcatattgaaagcatatgagctaactcattctggaattatgcacatcttccttctgcttattgctgtagattatggatacctcgtgcatccattgtcctcctgtgctgtttaaagggcaggggagaaggggatggtgaattccatggatccagcagagcatctgacccacaggggacacggaaattgcatcgtttacagcaggcaacactaacataggcttcacttagcagaagttcacaactgaagcactcggaaatgtgggcatggcagtactacactgggcaaatgatgaccctgtagatggactgagcaggaatatctggccacccttccctgaagtccctttaccctctcaggcctctgggctcagagttcacaggctgagggtgtgtttgcttggctgtgactatcccctcagtttctctttctgggtatcttatttcataagctgagcctgccacagagctctgggattctgctggctttagtctgagcctctggctttcattgctgcccttctagccagatctgggaaagggtttgaaaaatgacactgattggatgcacatttgatgaaggtgatggatggtcaggcaactctgagtccctagacccagatataattgacaggtgtaccctcctgatgggagccaagacccagacttcttaagagaggccccctcccactcctctccacccacacccctactgtttgcctagctctttctgcagagacccaagggagctatgggcctttccctgcccctggtcctcactcagccacctctgtctccttggtgctgaaaaaccccgcctgtgttagtcttctatttggggctgcagagtctcttcccatcccattactgaacacatgccttggctttgtgctggggacctagtatctccattgccttgctatgtcggacccctcttcttgtgccttcccgccttttccgtggatcttccattctcatggagcattttagctagatcttgaattaaggtcttattaggggagcttcagagcacatttgtgacaactctttctctgttttcgaatttcagagatttcatgggttggggttaaccagctagaagatgcatgtcttggaaagggtggaattccagactatttgaaagagagccaagacctgcccccagcagtttagagaacaacccaaatattgggtttaactggtctgctagagaagtcataagatccaggtcctaagaaccccttggcaggcaaaagtgaaactctatagagtctcccaacagcatctgctgacagtggaagtattccacgtttctaatgagtgtaggcttaaacatacttgggaaaataagtcccggtaagagattactctgacagctctgcatgctaacgtggactgcttcttattagagcagagggggatgggctttctgtttgtttttggtgtgtttgtttctgctgccaaggtgtgttgtaatgtcaaggttgtttaatatgtatgagcctccaccatgtatgagcgagaatcagagtgcatttgctgtgaaatgagattggttccagtcatttaaacagctccaggtgtaataagagtcgacaagaattgatgccaagaactgctttaaggattaactcatttagtcctgaggctggtcctttcaggcaggactgccattggcattccacttttagataataaaacttaggtttgcttacaataatacaggcaggcaaggctagaggtgacattgaagatgagctatcatgttctaaagcctgcatgtcaactgctaacttaaaacctgtgacgtgttgttgtaggttcagatggtactggacttgtacattctaaccccgagaacctacctttattgataagagtgacaacaactaccaatgaaggacatcctctttgagaccgaaaagagaactcgatggtttgttagtcactgatgtttgtaatttgtccacttgtttatctgcctgagactggtccttcttaaaacactgctaatgaaacaggatgctggcatcaacgaaggaggaaaatgagaagggagaagagtaggaaggcagagtgatcaaatggcagaggttggtgggataaagcgttcaagaagaacagaagctgtccaagtggatgctctgctagtcctgagggttgttagtcctctgctgctgctatgtgcacccttgaggctggccaggcatcaaagatggcggtgctcatgctcacttgattctgtcttactcctggataaatactgctcctacttccccatgtcactcaagtaagaaacacagtttactctgtcccaaaggcctggctccagcagttgtcttaattgatggttttgaagactgtagaggttttgctgttggtgagtgttgtaagggtgtctgtggttctgtgatctggcctctgcaaactatccatctggatgatgtataccatcaagctgttctctgtattttgttaaaatgtattttcaattgcttgtaagttcatttcaacttccttcctgaaaaaaaaaaactcactaattattcctataaacaccatcagttgtgtgaaagtgaaagcctgtttgagtcaggccggtggcacaggtctgttttcttatccacgtaagaggcagaggctgatggaccaaaagttcaaaggcagaagggcgagctcagggtcagcctgggccacttcatgtgacaccatctaaaaatgaagcatcatgaaaaactattgtgagtgttcaagggtggtatgcttacctataacaaagccctgagattactcagactaatgctgaggatgagagagagagagagagagacagacagacagacagacagacagacagacctaggcttagctccataatccacacataaaaacatgaaagtcaaacttctctttaaaattcttaaacctaaatgccgagagcatgcagtttgcacacatttcatttaagcaagcctcagagagaacccttcactccaattagcttaggtaaggtgctctcatggtaaggttaacatgtcctgtcagtttgtttgaagctgttgggagagtgacatcccatctaagccttaacctgagcagaagcctctatgcgctctttgcaaacaatcatagctactcaggcgagagcttcactccacagccataggccatgcagaggtgttagccattgtaggggcagtgaccatgacatttgcctagagcacatcccttaccacatttccagtgtcatgaggttctaaccatgtgatcttcagtcctgttttaaggcccaacccacctctcacttgacattttacatatcattctgtataacagaatcatttgccatgttgagtttgccattctcctcattgctgaatcttatcccttggctcaggtcattataagcaccatgcctaccaggctactgtagactctagtctaggccctatttcttatgctacatcccctttcaggacgtagggtcacacgattcaactaagcacccatcatgtacaggtgaacttctacacaagagggtgtgcttgtctaaaagcgtgggagttgtgacagttctcttgccaaacataccaaaatgcacactctaaccaaaattctagaagaagtgggaattgagacgtgtactgttgagacttggggtcatggcaaggcataagaggaaatagtactgagaagacatgatgttgtgttaactgaccctaggaagcacttctagggcacagtggagaataagcatgcccagctcatgccattaaattgtttatagctagtgttaagggcagagaaggaaactttatgccttgcagctagaccaacgttttctcctctgtagctgatcactcagtgtggggtggtgaaaagaaaccagagaagccctgagcagcgtggatttgtgtttcaatagcattcaacaccccgatgaatcatttaggactcacggagttgaggcacagaaaaggaagtggaaagatagcggcagtttaccaatgtgcttgcagaagaacacagaggggacgcagcacaacagagagggttagcttgggaacattaaatggcgtcattacacatggctccttttcactgtccccacatggtacagcatagtgagaggagctctatggggtctccttatgatcttctctattaaggttttcaaatggaggtcttacagtatagcccaggctggtccccatctcccagcaaccatcctgtcttagcctcccaagtgctgggattctagctgtgtatcaccacccctagttttggtgtctcttaagagaggattgaaagagtccttattatcttttataaagatgccaaaagatctctgtcacaaatggggtaacaggctccaataccattgcatagtggggccagtatttcaccatgaatttcagagtcatatatcagcattcagcaccgtctatgagacctctgaacagcgtgctctctattgtgaaccaaaaggctttgtcctagcttctgcttctaggtctaccacagcttcttgaagacaggccctgaggcacagctcagagagagcaagtctccaattccaagccttttggcgcttgttccccccacacccaccctcattaaggcttgctctactttgaagatgtctccaagacccagaggaagcccttagatagctttgtttctgtggagatctttggctggacttttgctgtctctcccagaggtgagaggccgtggttcccaaagcctcgggtttggcaccagctcctccctggtaagttcagatttcaaatcttactctggccacggcctcctctctgacctagagtgaccttacaagccaccaagcagacagactcttagcctttaccattggtggttttcattccagacaggagccaatgggttttagaaacggaatgagtgggtgcctctcaccatctccactctggcctgggtctggcagagatttcctctgtggcctgggcaaggaataactgatgaaaccaggctgtcccagtgctttgtagtgtgtcgagcaggcaaagttcttattactgtcagatggcatgcacctgggctacataggaaccatattcctcctgagttggggacggctctgctaagctgtggtgggtcctatacgtgtttggaaccatgacagcatggggaatatcagcaaccttggtttgagaagctcagtccccagccccaatggatagttgataatgcagatactcataactggtcaaagtgataaggataagtgacagttgagtgtccatctctaaatgagatatctctatcaagatgctcctcaccctaggcccagggaacaccacagaagggaccaaaagcatctaagcggtagaggatggagggagtgctatgaagtatgctcttgataggacatggctgtcacacttatgaacttacaacagctggggtcccctgaataaaaacctgcattagatcaagcctgtcagcatttcaaaggaatgggggagggacttgtgaaacccacccctggttgtagttgatggctgtagagggctgtctgttttggaagggtttagacaatgataggttacatacactccaatagatgcacccaccccaaaccacatgcatgtaggagcactaatttgtctcaatggctataaagaaagaagagggcattgaggagggtggggtgggacaagggggaactggagaaatgggatggtggggtttgggtgcaataatgtcacattgtatacatttttaagaatgttaaaaataaatgaaaatattactttaaaattttagagcattggagctgagagacagcttggaatccatctattctcgtttagcccaattcctttagtgaagaggaagctgggccctttatgggaactgcaccactgcccagtctgggtggggggtggtgattatggtagagcccaagctagcgctcaggcccatgggtgggtttgctggtagtttctctttctgtcctcgctggttcaggatcctttagaggctgtgaacaaaatgagaaagatgtataccaagcctaacacactgcctggtatttagcaagtgctcaattagtgtttatcattactcgaagaaaaacttagaggaacaagatatccatgcctttgagaccactgaagttttgttgaggactcacaagactcgtggtcatacatgcacacaactgggaatttgtaaggtacaggttaccgtaggtagggttatctgctgagtcaatgggttcagcaatggaagagatatgttatgactgcctataaggaggaaagaacctcatggaagaagcatgtgttctctgtnnnnnnnnnnnnnnnnnnnnnnnnnnnnnnnnnnnnnnnnnnnnnnnnnnnnnnnnnnnnnnnnnnnnnnnnnnnnnnnnnnnnnnnnnnnnnnnnnnnnnnnnnnnnnnnnnnnnnnnnnnnnnnnnnnnnnnnnnnnnnnnnnnnnnnnnnnnnnnnnnnnnnnnnnnnnnnnnnnnnnnnnnnnnnnnnnnnnnnnnnnnnnnnnnnnnnnnnnnnnnnnnnnnnnnnnnnnnnnnnnnnnnnnnnnnnnnnnnnnnnnnnnnnnnnnnnnnnnnnnnnnnnnnnnnnnnnnnnnnnnnccatgatgatcatggatcaaacctttgaaactgtaagcaagcccccacctaaatgcccagatgtccctcaacagaggaatggatacagaaaatggagtactactcagctattaaaaacaatgaatttatgaagttcttaggcaaatggatgtatctgaaggatatcctaagtgaggtaacccaatcacaaaagaagtcacttgatatgcactcactgatatgtggatattagcccagaaacttagaatacccaagatacaatttgcaaaacacatgaaactcaagaagaaggaagaccaaagtgtggatactttgatccttcttacaagggggaacaatatactcatggatggagttacagagacaaagttcagagcagagactgaacgaatgaccatccagagactgtcccacctggggatccatcccataaacaaccaccaaacccagacactattgaagatgccaacaagattttgctgacaggagcctgatatagctgtttcctgagaggctcttccagtgcctggcaaatacagaagtggatgctcacagtcatccattggatggagcacagggtccctaatgaagaagatagagaaagtacccaaggagctgaaggggtttgcagtcccctaggaggaacaacaatatgaactaaccagtacccccagagctccctgggactaaaccaaaaaccaaagaaaacacatggtgggacttgtgtctctaactgcatatgtagcagaggatggcctagtcggcggtcatcaatgggaggagaggtgcttggtcctctgaaggttctacttcccagtataggggaatacctgggccaggaagcagaagagggtgggttggggagcagggggagggggaaggggatagggaattttcagagaggaaactaggaaaagggataacatttgcaatataaataagaaaatatctaattttaaaaagaaagagagagagagagagagagagagagagagagagagaaagagagagagaaaggaagaaagaaagaaagaaagaaagaaagaaagaaagaaagaaagaaagaaagaaagaaaggaggaaagaaaggaagaaagaaaggaaggaagaacagcctgaggggtagagggggcgtcaagtgtgccacccagaggtcaaaaaaagtaatgagacctggatcagatgccacttctgaggcctcaagataaaggcagtttgtcacctacctcaagagtctttgcttgtcactttcccgtttgactccttcaccctatgacctaagtcctcatgctaccttgcaaggccacaagcaaactggtgagccaaaacccaggcaatattaagaaaatgggcccttcagtttgtgacaggcaagctttacctgtgtgactcgttgcggttactctttgctttacactctgtcacctcaaagctcagtgagacaaagccacagcaagtgtttttctcatggcttcgctttggtgacttggctcacctgtctttgctcaaggcctaccttgaagtttctggaagccgctgtggtggggctccactggacggtctcctctctccaaagtgggagagtggaatctgttgtcccatgggacctcagcttggatggtcagcgggaacacctacctagggcttctttttgtggcctggactttgtcacagcatggtgcctggcgttctaaggcagcagtcccagggaagagaccagatattgttccacaaacatcatttttttcacctgttcattttgttagatgtggctccgttgagtttatattgactcagttcagttatatacagtgaggcgctagactataacaactatctgtggagacactttaaaactaccataaaggtttccctagtaagtattctgctggtttaaaaacacacaaacagtcagacagacagacagacagacagtcagacagacagaacctaaagattttgtggatggctctgcattttaggaaggaagatcagagagctggactaggagaggcagagtaacagagaaggactgctggactagataactagaagtctgaccatgcctctggtgccccagagaaaggtcgtgtaacattgggaaagacaaggtctccggtctcttaaagcttttactgttgtggttctgtggtttcggaagactagaacattccttgtgaccttccaagctctcatgccaccatcccacatactgaccccgccccctgtggcccaggccttggagagacagccctccactcatgaaggccagaggagctgggataggggtgcactgggtaaacaagaaaggctgggtaggtgggagattcacatgtggaatcctgtttggaagtgtcaggagagagagagagagagagagagagagagagagagagagagagagagaggaaatatgtgtgtgtgtatgctctgaatgaagttccagggcctgttgaaacccagcaaggtcatgtctaaggtattggcaagccaaaggatattgcattgtgtgtcatgctgaccactgttgtgtgtttggaaagagctctacttctatttagcatttatgccatcttcctcttcctcctggaaatcctctggcagcatctaggtttaacatcccaatggggtataatatacaatgaaaataggtgagtgatattatatggtgtatggctggtgcccactctctgcccaggaagagagtgcatcttccacaacagtggattcactttttaccatctcctgttcttcgaaggggaatgaggtaaggcaaggcatctggatcgttctttccttcagctactttacaaattctagttgtctccattttacagatggaaagacagaggtgaagggaaacaaattcctcctctgatgaaggcagaaggagcttttgctgttctgtgcaaacagagctggtaaccccaggtcacctgggtcacatctcaagtccttaagcatatgttgggcctctcaaggtttttggctcagggttggggacatcatgtagagaggaaaaggccaggagacccagggagaagttaggagtgaagaagactttgacatatcctcaggaatcaagataagcatgaagatgtttgggaggctctgttgtttgtgtgtgtgtctagggacctcttacccaaaccaaagtcatttctgcatatttttctgctgaatatgaaatactccaaagattactcttcttatttgttaaattcaaaatgactcagcagagaggaaaaacaagtcttgaatgacctccaatgtcctctgaatcaaatccgtgaatgagatttctcctcaccaaagtgtaatcatctgcacatgtacacacgagtgccacacagttatatctgtacacatgtgtcagcatcagcttgtcacacatccttcgatttcatttctagtcattccctggcttttcatccacaccctggacagagctgactggccaggacagcggcccttcatatgtggtccttgacataggcttcaccgaggccctcagaggaaatctatagacactgattcttcatcaaatccagcatcatgtcaggttgtcctcagctatcgggtctgggatgatggacagtctgggaaaagggtagcctgctaagtcggacatgctgtatacctgagaagttggttatacactggattttagtgcactgagtattatttcgaatgcacttagaggatttctgtttaagggtgccaggtcctggatccattagcaatgttggctactcattcaatgattcacaactttgataagtagacggaacacttttaaaacaccaaatgccattttaaacacactatgcgggatttgttattcaaaactaatcagcaactttttttttgttggttttttttttttttttttttttttaaagaactagcctgtgacggggataagaatgtaatggttttcacattaagtaagatcaggcatttcataaggagggatgtatatacctccagttctacttcagagaaaaagatgagttatactaacgttctatatgaagatacaaaggaccctaccatctctgggtttagctttctctaaggggcttgggaagaacagagctgttaaaacttcttactcactaggccagaagaccccaacagttgcctggacttcctactttttgcattatgacagactgaaaacaaggggttactttatttttttatttttcatttatttatttatttatttatttatttatttatttatttatttatttattttgtttttcgagacagggtttctctgttgagccctggctgtcctggaactcactttgtagaccaggctggcctcgaactcagaaatccgcctgcccctgcctccctagtgctgggattaaaggcatgcgccaccacgcccggcttcaaggggttactttatatatatgtatgcatatgtatacatatatgtacatatatatgtatacatatatgtacatatacatagtttctaaagaaatttctgattataattgtatgcatatctgtaccatctaaatcagtttatttctctacttgtcttctgcatgccatctatcttaatttattatctatcttctgtcattttcatccacttatcaatcatatatcatctagcctttctcatctacctttcatttataatctatcaaccatttgtctattttttttacccacccatcatttactaattattttcctatcatcaatcaacattgatccgatctatctatctatctatctatctatctatctatctatctatctatctatctatcatctatctaccatttatctatcattggttatttttctatgtatatatctattatctgtcaatcaacatttatcatatatctacctattatcttcctgtctgcctacctgcctgtctctctatcccccatgtattcatctgtccatctatccactcttccatttattatctatcacatgcatttaattctatagtgaagaatagattttccagtggggtttgtggattggtctgccaaagagtgtggtttcccactaacacagagagtccaaccttgctctgagattatgaagcatgcgcattagatgaggtagtgacattagctttctgctcacttagaagctcaatattaatgtcatctttgtctctcaaggttctttctctctcacctattcactactgtgaagcttgttcccagggaggtactctgatttaactaagacagttgtaagagacaggtaccgttataggggcgcatagcccttgagttcaagagccataggactgaccaagagtgaggcatcttgtgagaaccttctgtaaaataggcttgacctttctctatgaagtgactttactgcagttgagagaggcttttgtaagttcgtcggagttcagaggtaattagtaagaagttgaactttccatactcttgtttttgttccctgctgaagagttgctcatttttgggtgtggatgccacactcctggctgaccttccatttttcttcctgatttcctagcatgtctaaatcctggtgtagacctacctgaggtagaaagtcaataatcttctataagatctcatagagtttataggaagtcctgagctgtggcttcttctatgttcacctaggagtgtccattgaacacggggaaggggaggggattttgagttgaagaaggggggagaacggattctttactacctattctctttgagccacatgcccattgatgttccttgggaagtgttgagctgtgggcagagaagtaccagccttgacattagggtcactaaaatcgatgttaactgtctttcctcctaacttcatggtccagggaattaaaatcaaccttgttttgaggcagggaaaacaagatccctaatcttagatgagtcatagtctgacttggtagacagacagacagacagacagacagacagatgggttaagaagagaactatactcatagtagtggatgggaaaaagtagctggtacaggtgagactgtccagggtgttaatgaagcaactgtgctttctagatctgtagaaagaagatgacaatcccccctctacatgattgtgatgactgtgatatcatacatttgaaagatcctcaacattcaaaactagaaagacacaaggtgattctcaaccatttttgtgctcccacttgtaagatgttttaatcaatatggtctctgagtagtccaagtgtcttttggagatgcaggccatgttgccccaacacctcccattctggaacatgcaggattgcctggaaagcatcttgagattctgacagccttatgccaagaataatgttttcatttttttcagaaaagttattataagtgacattaaccaaaaacacattcccctcttaaagatcaaacaatgaactaggaagatggctcagtgtataatggacttgtaaagattggagtttgggtctccagaactcacataaaagccaggtaggcaggtaggtgtggtagcctgctgaagtctcagtgtgtacagggaattcctggagcgagctagctagccagactagctgcatcagagagctgctgttcaacaaaacagtctgctgctgcagttaataaagtgaagaatgacccaggaagacagtcaataccaacctctgttctctacacacaggtacacaagcatgtacgtacgtacagcacatacacacaggcacaaaaaaatagaattactatgaataaggcagtctccataattgcagtcattcacgagtcctcttgccaaaatctgcactctctctaagatcttctgctctgagggagtcattgttaccagatcatctgtgaatatataaatgtgtgtgctcatgaaaacatatagaatgctccaaaaagactttgcagccttcttgttcacctaaaaacatgtcacaagtggcaagctatgtgaccgcgcatagctgtaactcactgtttttattttaatgagttatttactttatgtgtatgaatggtttgtctgcatgtaccacatatgtgtagtgcccagagagaccagaagagagtgctcaatcctcctggaactggagctatagttggttgtgggttgatatgtgggggctaggaggcaaactgagtcttctgtaagaacagccaatactattatacgctgacccatctctccagcttctggaattcattctttttttgccatcaaaaagtatttctatagtaggaacagcatagtacttagcatcctcctgttgataaacatcttcccaagtttttgttacttagaaaatatactgcagagcacttgtgtgtacacatatgctgtatgtacctgcaacctgctctctaagatacgtaacatgtgggcagcatggtgcatttttagctgtggagcatgcatttcacaccattgtcaggtctcacgtcatcaagcttggatagcttgtgagaccaattcagcgactactctggtgttttgtttttggatttttctgagctagaatgctttcagatgcaatatactgtcccctttgttagatgttctttatttacttggcccatatttctagtggctttttacaacagaagttgtttcacttcacagtttcaaatatttaactttgttccttgcttatctgttaagtttataatatctttcttgttccttggatgttttgaatttttgtggggaaatgttattatcactatttttcttctatggagtttgctttttatgtctttttcatgcaagcctttctttagtttatagcaaattcttgtgttttcttgaggtcctttcattgttctgtctttacattttgggctctatatttttgtgtgaggtgtggatatgccttggcttttgtttttgaaaaggctgttgagccactggcactgtcattgatgttgttttgttattttaatgcttatttatcaaatgcttgtttattcgtgaatggcttctggctgcccagcctctccactgttctgcttatctgcctctgaaccgctggcatgcttagaggatttttactgtacggctttcctgggacagcgtatccacttctgcagtcttcaatcttgttttctttattgtttacagcttctcctcacatgccctaacatcttgtttattacgagattgaaaggggaagaaatgatttagagcatttggcctgtcagttgctgtctctttatctttgcatacttttatttttaatttcattttttggggggggggtatttttgtttttgcttttgagtcagggtcttttactgagcccactgatttagctagattccctggacagtgagattaaaggatccttttcttgtctttgtctccctagtactggaatttgtagctgtgtcagtatatcttagtgacatggattctcggagatcaaactcaggtcctcatgcttctgtagaatacattactgcctgagccactgacccagcccttctctgacatttaagatgtatatataccacgtgaatggcatttcccaaacaattgctgagtaaatgaatacaaggcaatactctgaccaggcacattttcattttgaattttattttattttaagactaggatgaagtgtttgttataggacttcatgttgttagtcacaaaaatgcacagaggaggactctctcaactgctcatcgtgtttccatgattgctctgggctctgtcatgtgccacatgggtaaatactgaatccttgagaccattgattcagagggttttgtctgctcattggaatccttgaggaaaattccttttagggcaaaacatttcagattagctagatatagtcactgagtatttgggtctatgatggtatttatcaagcctctctgttgagcgttttgaacacagtagcattgagaataaacatggagcttacagaaaggatactaaatagtcacggtgaccatacatagttgaaagcatgatccttactatatgaaaagctatgttttcagtgcattgagcaattgagtcagaacacttagctgcagaaataactattgaataaagggggcaggtaaggaggaaagagcttgccagaggtccataggcaaaagccaatagaagaaataaatgagaaacttcagtagaactgagctggagagtaggggcaatagaatagaatagaatagaatagaatagaatagaatagaatagaatagaatagaatagcagactaaagggatgatgacaatgtcagtgaccccaggcagactctggagtcatgcgaaccccaggcccatgtgcctgtttgcttctttgtgctgtaacatggggccacttgtttaaaatcagattagctatgtaaattatttggaattctttttcatggaaaatgagctattctccctcatttgtttattcagccattcatttacatcaacatggatttgtggatatttatttcatactctgagttataatctaatactcctctatttgttttgttgaccaaattgttccagctttcattactgggagaactttcagttgactcctatgtgcttttgatgtatttcatcgtgtgtgtgtgtgtgtgtgtgtgtgtgtatacacacttgcaagattgcatgtgtgtgcatacaacatatattctaggcttatcttgtgtatttcctgatccagtgctagactcaaccagtttttctaaagacctctggttcttttattggaagatgggattagaagccaagatctgggcacttggtttgcactgacaagatgctgttgtctctaggcctttcagctaactgagtgaaaggacagtgcatatgtagtatattcacttgtatacatacaaataactacactatagatagatagttacaatgtaactctgtatgcctctattaagctaaatctgggtatatattgatatgtccatactgtatctaatctgttgtcacatgatcacttggaggaaaccttaaaaaaagaaagaaagaaagaaagaaagaaagaaagggaaaggaaggaagaaagccaaaaccaaagactcaaatgtcacttcaaaactaatggatcaagataagtgttgatttatagagatttaaaaagattaaagttactgaatgtttttcttgggttaatgttggaattaatgttgataatatgaaaatattagctgccatcataaatatacattttactttgttactaccgtttggtattcgcgtcggtaatacattgctacctgtgtgtagttctgttgatttttacttccaggagtgagtgtttaatccaagagagttggaaaattcttgcacttaatgatccctgggtgggatttgaggctttaaatgtggaaataaactttacaagagtcccagattgtctgtgaagatcgtgttcccgtgtgctggtgaaatctgcattattcacttctcttccttctctctttccttgcattgtcggtgggctgcagactccagatccaactccgtcttctgaaatgatcccgattcccagaatgcccctggtgctgctcctgctcttgctcatcctgggttctgcaaaagctcaggttaatccaggtaacacagccactactcagctgggtgctgaggaccaggtgcctgcacacacctctgccagtggttatcttagaaagagctctgccaagaaaactccactgtcagttctccctgtgtggtgaaccgtggccacgatggtcagaaacaggaagttgtatcactccccctctccttatataatgtgttgggtattatacaagagattttacgtagaccagagccatttcaatggcattaaaaaagattaggaaaaggaatggctgtttcatgttgtgtattttggggaaaatgggaaattagagatgtagcagacagcttcatttggttggctcatccattggatgtcttgggtctggattttaattgagtgtcctgttatacttttgggatgctaattctgtgggatgccgggttcccaagatctcaggtaagcttttgttctcacaggatgtgactgttcaaaacagatgtgaggtgactcttttaagtcaatatttttggattgttttagttcatatatctttaaactttaacctaaagtatgtgattgtatcaactgtctgttacacaacatgttgcttaacgattgtcaatagctcagtggcttaaaaacatgaatgtttgttttgctcataagcttatagtttgatgttttatctgtcttggcacatttacccatctggtaatattggctcatctagggtttctttggccctgatgaagggcactttggctgttgctctgtggattcctctagcagactagcctggccatgttttcgtggaaattgcacaagagcctgagtagaagcagcgtatgcaaattcaatccagtgctcaaattatgtttgttaagactgtgtaggccaggatgagggctgtaactgaagaccttgtctggagggatgcgggctggtgcttggtagtgcttgtccactaaggagaccctatttcaattcctagcactgagcggggggacctcattggtcaaagtaggtcacatacatgtgctcagagtccatagaacaaaaagaatgtgtatgataaagagataggtacaggttgtctggtttttttcagtgaagaaataaatctgtgggctggagagatggcctagttgttaagagcacttgctgttctaccagaggctctggctttgattcccggaacctacatttagttcctatcatggtgggtgtctcagaactgcctctaattccggctccaagagatccagtgcactccttgactaaatggaactccatcatacccctcagatcttaccccagaaataatcactccccgaatgtattgtatatcccacacatgtagattttactaaaacaacacatagctggggatatagctcatttgacagagtacttgcctagtgtgcagagagtaccatagaggactgagagtggcgtgcatacctcttgccagtcgtggtggcacatgccagtaggataggtaaagattttaagtcattttaaaaattcttcctcaaatacaaatatatgaaagtacacatatcttagtgttcagtttgatggatttttacaagcccaagatatccattcagacctgtctaacttgaagcagagtctaactatgaatgtggactaacacaaattgtacacttacataaagcatgagggtttttttttccccattctccttggacacaccagaggagggcatctattacagatcctattacagatggttgctgggaattgaactcaggacctctgggagaacagccagtgctcttaaccactgaaccatctctccagcctgtgaggtttgtttgttgttttgttttgttttgttttgttttgttttgtttttgttttttaatgtgattttttttgattgtgctgcttctcaatgtgaactttgtagatgacaacattgtgtggcaatatcaaagattggacagccctggcagtgagctacccttcatatataagaaacagaggcatcatggagagctctcacctacctcgccctggtgacagcaattatgttgctctctagcaagaaagatgaggtttccctgcttgtattttatataagtggagacacaggatacatggacactgtgcctagcttctttaactgaacattttctgtatggcatttattccatggctacaagtactagctgactatccttgctgtggtataatattacttcgtgtagttcatttatatggtctagtacagatgggaatttggatagtttgggcctactgtgaagaaatcttccatattcttgtatagagtttgtggtaaggacatatactcacttttctggggtttatatacagaagtggaattccttggtaacttgtaacatatcatttagtgttcttcataatgccatagagttttccaaagtgtttttttttatccacttagcctcccacaatagtatgtagagttcaattttccaactagctgtaattacattatcaagggtacatccatcttgtctttgtactagcataatggtatatttgtgagagtgcttcctcccaccaagtctgtgtccatgggctattctttatgtccttagtaggaaacatgatcaaaactcctcaaataaaataaaataaaataaaataaaataaaagaattgttgtttgagtggattcagtgcctttctcattattataataagcttagtgaaggcacctcagatcttaactccaacagcttttagtatttctgctgtgtattcctcttatcctctaaagtttggtttgtctcctctgatggtctttctgctctaagctccaaagaggagggggaagggtgcacacagttgtcatggagactggtatacccaggcccacttaagcaattaaaccaagagaaccagtttctagttagaatagaaccagtttcttgtgttagaatacaagctgtagtttttgagtaggaaacgggctgccagaaggcgatttcactccctgtcttgctattaggcattttcgttggatctttctgccagcacaaagaaatggacatcttaattttgaaccatgttcctaggcatatgctaccaagtgaagggctgaccattctctttgccacctccttccatttaccagttaagctggagttgaggatgtagagcagacaacaatttttccattccagctcagttttaaatggctgtctaggaacttggggctcatggagctgtatggtttggccactacttagtgcagagtagatacataataaatgctagctgatttagaggagacgcttcaggggttcctactggtgtctcccaaaagactgaggcaactgaaagtactgattgttacagatgttgctcagggacaagcagttctgggcttttaggattgttcacacaggttagccaaactgtataccagagagacttgggttataagcaaatattatatgatcaactcttagaagaagttggtttaagaccattttagaaggtatcagaaatcctatcctaattagttataagccaaatttattgctttttgttttgttttaaatctttttaaaaatttatttattgattatgtatacagtgttctgcctgcatgtatgcctgcaagccagaagaggacattagatctcattataaatggctgtgaaccaccatgtggttgctgggaattgaactcaggactgttggaaaagcagccagtgctcttaacctctgggccatctctccagcccgccaaatttctctttaatgattgtttgaaagaaagaaagaaagaaagaaagaaagaaagaaagaaagaaagaaagaaaggaaggaaggaaggaaggaaggaaggaaggaaggaaggaaggaaggaaggaaggaaacggaactcagcaattcaaaattttaaggccatccatctacaatgagacagatatttttctataagagtagaaaagttggtaatccagtagaaacactgcagttcataatatgcttgttaataattgtctcatggcttcaggcaccatctttggcactgtggagtctggcagcctgtgcagtgcaaagtgcatgtgtcctgcactaaccatcaaggtcccagtgatgctgtgcactgcaacatgggtgagcacagccagaaacaccccgctgctacacatcccagtctgagctgatctttgtcgttgaactttcaaaaaaatgtttgcaattcctgtgttctgtaacccccacccccacctcaagtatgagattgtgacccacagtttaagacatcaggctgtaacccatctgagttttggcaaaggagttggtaagtccagtgacgatactgacatttgcatagatggcggtgttctaagtagctagagaggctgtggagcaggccctgggagtctccatgaaaaataccgagatgctgcttgttccagttctgcagtatggctagtgtgctagcaaccgtttagttccaccagtgcactagagtccaaacctaacaattgccaatctgctggaggaagtaatggaaaggctgagggtagcattgtaaagcagaggtcatgattcagaagttagaatgaatggcaacctgcacccagcaaacaactaaactgccagtctctccaaggcatctttacaagccagcaagtcaatttaggtgggattagaaaattctaacgaacaatgtgaagttcacttagaaaaagtcttagctttagtgtttatttattctttcatttattatttatttaattagcttataactacaagttgattaagtttgaggttcattttgaagccaaaacaatagcataaggctaagagaggtacagagaattcacacttggaaacttagtctctttgtcgaactaaatgaggaagtcctaaggcagaagacctttggggctagttcaccttggcaaagaaactgaagtactgggtatgttctgggtcccttctgtaacaagttgccttcttacttccatcaagactgatgtatttctatttccaaattggaaaattattatttacctgggttctcactattcaaatttcaagagaaatgctgagagtataatactctctctctctctctctctctctctctctctctctctctttttctcctttcctccccctctctctattgctctcttgctctctttctctggtgattggaacagatccctgggagggaatgatataaaaaagcaagacagatacgttcctggatgaatttctctcaaatgagctatctagatgggctctttctttcttgcatgtttgtttgtcaagtatagccctggctggcctctggtaccctttcttccagtaaaagaatcttcctttggggacaacagaaactcaactgtccctgaactcttctgattacaccaagtaaggaaaaagaaactgttcgttgaagagctcattgaaagcatcaagtgatattcaaagatcatgctacatgttcctggtactgtattaagtcgtactaataatgtaatcttcagaatgtaataggagtatgtagtattattattttagttttacaggggaggagtggggccccacaaatgtttggtgaaaattaaatgttatagaggaatcagagtagcctagatgggatcctgtctagtactatgaggatgatagaccttgacctctgagctccactgcctcctgaaggtagtgagacaactaaataccaatgtataggagtctgtgagtcatgggccagttgtgtgggcatagatactagggcctaagaagctactgcagttgaatctcaaaatttgatttgtggaggcaaaagtgcattttgtaaaagaaaacttctctgttactagatatttgaaggactctgtggccagttctcagaaagttcaagaaagactggtttaatctagtcttttacaaatgaggaaactgagtgttgtggctgtatcatttctttggttatagtgaaatgctccgaacaaaaggaacacaggagaggaagtttggtttgtagttgtaggttatagtccatccctgaaggaaaatcaacacaggaactcaagtaacacccacagccaagagcagagagaaataaatgtatattgctgcttgcttttgctcagctatcttttttcactattatatagttcagaaccccctgcctggggaatggtgccacccacagtgggctaggtcaattaacaaacaagacaagcccttgcagatatggcaaaagaccagcctgacttagacaattcttttatgaggctatcttcccaggtgattctagattatggcacactggcacttaaaattaattgggacacaggttcacagagacaaaatgatgggaggaaacacccattaaaaaacatactgctaaatctacctttgtacataggctgtgtcctgattgtatgaatgagcatggcagggttttcagcctttgtttgaacacactcagtcttctcatctatcattgctaaccacctacggactattgcaaagaacaagattatgcatgtaaaggacctggcataaacacccaacacatgaaaaaatgcttaagagataccaggtcttctggccttaatgtatttattgtattatgatgattgcatacttcattaacaatttaattattctacactgtctcatgtatttgaaattgtgtagaatatactttgtgtgtgtgtgtgtaggagttcatggatcttacatcttaggatgaaggagctccaagtgtaatttcttgacaaacagtattttatcccaagtatctggtagattcttgtccatgctctgaagttttgcttgtattttgttatttttttatttatttatttttccttttccattttttattaggtatttagctcatttacatttccaatgctataccaaaaagtcttccccatacccacccacccccactcccctacccacccactccccctttttggccctggcgttaccctgtactggggcatataaagtttgcgtgtccaatgggcctctctttccagtgatggccgactaggccatcttttgatacatatgcaggtagagtcaagagctccggggtactggttagttcataatgttgttccacctatagggttgcagatccctttagctccttggatactttctctagctcctccattgggagccctgtgatccatccattagctgactgtgagcatgaacttctgtgtttgctaggccccggcatagtctcacaagagacagctacatctgggtcctggtaagaaggacacatgctccactatgttcatagcagccttatttataatagccagaagctggaaagaacccagatgcccctcaacagaggaatggatacagaaaatgtggtacatctacacaatggagtactactcagctattaaaaagaatgaatttatgaaattcctagccaaatggatggacctggagggcatcatcctgagtgaggtaacacattcacaaaggaactcacacaatatgtactcactgataagtggatattagcccaaaacctaggatacccaagatataagatacaatttcctaaacacatgaaactcaagaaaaatgaagactgaagtgtggatactatgcccctccttagatgtgggaacaaaacacccttggaaggagttacagagacaaagtttggagctgagatgaaaggatggatcatgtagagactgccatatccagggacccacccccataatcagcatccaaacgctgacaccattgcatacactagcaagattttatcgaaaggacccagatgtagctgtctcttgtattttgttattttacactcttgagactaaagtctcaagctttcaagaatcagacagttgttggagtacaggagaggatagaacttttcttccagtggtcatggagtcagaatgcttggagacttaggctccaagccacagtgccaggagcatgatcatgtaattgccatcagaataccacttcaggttcctttcctgggcctcctttctttgccaccaactgcgaactcaggttcactttgttgagaggccaagagaccacagaaggatcctcaatcctgccaggaacatacaaggtgtcagtgtctccagtcactgagggccttactaaattgcttagactagctccaagaatgctacatagcccaggctgactttatacttgggatgtacctacctcagttaggattatatgtgtatactgtcatgcccggtttatttatttgtatatttacaattatgttcacacggtgactgagttgtcaaatctccagtgtcttgctggctgaaatgctaagatatgtccgtgagctacaggtcaggtgacaagaggaaggtgatgcatttgagtgcaaggaaaggtatggaggcacacatgaagaacaaaataggaagataggaatagttgccaataagacgtcacaaaggcaaagatgtatacaggtggtacaataagcaggcgaaacataattttgaaattgttagtgtatgccaaatatttaatgaccacagctcttatctgcatctaggactaagatccacgatggacccctgactgcaggaggcaggtttcttgtgctactacatttcaatgtctctgagaccggggtattgttaagttttaatcagtaatagccctccttaagctttctttccagattgttcttcttcttggacatcttcctggccttcgagatcattcttaggacagtgtgtcaactatttgctattagcaatgggtggagagagaggtgaatagatggtgactgtggaggtcaaatgtcaagattccattctacatctgacataggtcaatgttatgaccttaaatactaaagtaaatcttggtaccacactttaatcaccagctctttgttggtataatgaaatgcctgaggcagggtgatgttatgaaaaacacatgtctgaactcacagtttcaagagcaaggggaaggacatggcagaagtgtgttcaaaaaaaagagatgaacagagccaatttcagtcttcaataacaaccaatcatggggtcctgagagagtgactttgctttctggaggtgggaccctcacctaaggacttcccaggagtcctcaccttttaacattcctccagtttccagattgccacattggggacaaagtggacaatgtggacctctgaggaacaaacaaaactcaaacaattgctcaattataaaccttactcagttataaggtggagaatgtaactttactatttccattcacaagatcacctgggggtgaaggtggggaactctgggagacagagaatgtattaagtcaaggacttgggaaagttacatgcaaatactaaactgccatttgtgactttggaaaaagaagggaatcaaaataatctagacaccccacatacaaagtttgtatcaagtagataacaaggtaggaaatggaaatacaagtgaccctgattttgcctgtagtctccaagaaagacttgagttgttagtgggaaatgagacctctgccagccctgggctgtagtcatcctgaccccaaagtgacagagcaaatgtggtgtatgtgttctagggtagagtgattgttgatttagcttttgcttttagaagtctctgaagagccaaataagcctttcagagtttttggtggtttggacacatacatagttaaaataaaacaaagttacagtcgttaaatctttgaggtttgagtgtgtgttttatgggcttatgtgggtggtgataaattgttaaataacatgcaacgtttccttctgattgggagatgtttctggctttggcctttatctgtttttctgtggtgatgatctcccacgcactcatgtccatgacgagtgcccgttgccatgcttggcttatgaaggcaatcagtaaatacttgagtaacaagggcagcgagggtagaaatgaaagtcaaggaacgtttaggcccatctgcgtttttctccaaaggggaaaagtgtaaattgtatcatgcgaaccttcatttcgagaagctgttggggaagctgaagggggtgggggcgtgggaatgggattcctccaacagtgagatgctaagtgtagagaaagcaaatcagaaggaggcagggggttgagggtgagctgaggtctcccagctgtagctaattcccagtctcctcagctctatgtggagacacccccttcccaggtggaggggtggaacaaccctggccacacaggagtgagatacccaggttccccctcctatggtatacaggatgagaatttggagtgttacaggtaacagagggcgtggttgcatttggtgtacttctcttactcttggcatttgttatggctgagttcagactgcccctttcaaatgttacaaccacagtaaagatcaaaggcgatcgaggcctccctgtgtcttatcactaacacatccctggtgtggaataagccccatctgttgagatggggcaaatggaatttacaaaagtatgcttttttttttgatgaatgttatcttgtactttttaattttcatactttttgttctttttttttattacgtattcttctcaatgacatttccaatgctatcccaaaagtccccccaaaccctcccccccacttccctacgcactctcatttttttggccctggcgttcccctgtactggggcatataaagtttgtgtgtccaatgggcctctctttccagtgatggccgaccaggccatcttttgatacatatgtagctagagtcaagagctccggggtactggttagttcataatgttgttgcccctacagggttgcagatctctttagctccttggatactttctctagctcctccattgggggccctgtgatccatccaatagctgactgtgagcatccacttatgtgtttgctaggcccctgcctagtctcacaagagacagctatatctgggtcctttcagcaaaatcttgctagtgtatgcagtggtgtcagcgtttggaagctgattatggggtggatccctagataaggcagtctctagatggtccatcctttttcgcagctccaaactttgtctctgtaactccttccatgggtgttttgttcccaattctaagaaggggcacagtgtccacactttggtcttcattcttcctatctccttgtactaaggtcaaatctaagtggatcaaggaacttcacataaaaccagagacactgaaacttatagaggagaaagtggggaaaagcctcgaagatatgggcataggggaaaaattcctgaatagaacagcaatggcttgtgctgtaagatcgagaatcgacaaatgggacctcatgaaactgcaaagcttctgcaaggcaaaagatactgtcaataagacaaaaaggccaccaacagattgggaaaggatctttacctatcctaaatcagataggggactaatatccaatatatataaagaactgaagagggtggactcaagaaaatcaaatagccccattaaaaaatggggctcagaactgaacaaagaattctcacccgaggaataccgaatggcagagaagcacctgaaaaaaatgttcaacatccttaattatcagggaaatgcaaatcaaaacaaccctgagattccacctcacaccagtcagaatggctaagatcaaaaattcaggtgacagcagatgctggcgaggatgtggagaaagaggaacactcctccactgttggtgggattgcaagcttgtacaaccactctggaaatcagtctggcggttccttagaaaattggacatagtactaccggaggatccagcaatacctcttctgggcatatatccagaagatgtcccaaccggtatgaaggacacatgctccactatgttcatagcagccttatttataatagccagaagctggaaagaacccagatgcccctcaacagaggaatggatacagaaaatgtggtacatttacacaatggagtactactcagctattaaaaggaatgaatttatgaaatttctaggcaaatggatggacctggagggcatcatcctgagtgaggtaacccaatcacaaaggaactcacacaatatgtactcactgataagtggatactagcccaaaacttagtatacccaagatataagatacaatttgccaaatgcatgaaactctaaaagtatgcttttaatttgtgacgttttagtaaatttgatcgacatttaagattgataatagagtttgtgttaggacctttctcaaagtgatagattagttctccctcccgccaattaagttaatgacagccccacaattctatctttggctactggtgtgtttctttccctttgtctttctgggttttttgtttgtttggttggttggtttgtttgatcttgacttgtaggaccccaagaaggagcccccccactcaagtctcgggatgcagggttacccaaagaaacacgagagaccttcttgttgcaaaagcacgtggcagctttaatggcggagctctgggtcgatacgtatctcacgcaggagacagaggaatcgaccctgagactcaaaaactcggggtttttatagggtagggtttaggggctaggaagaattggcacatctggttaatgttcagctttcaactatgctctctatagaaaggggggtgagcaggaggcgctgggctaccagatggtcaatgagtcagccaagatagtcagaaccagttcctgcattcctccccttatccttacgaccgggtgacctagcttcaagacggactcgggcatgcccgggctttttttctttgtagtctcagtcccaggcctttttagtttaaaccttttattttgtttaattttctttcattcccctcttcttctgtttagactaattctaatcatagaattttagagattggtgtcccctaactacctgaactacaggttgatattgtctctgaagaaccatgagttttactgcatcgattctactctggatgaaagccatccctttatttattatacaagggccgaaaactaaagctaagcatatcataaggactggttcagctacagtggaaatcaaagaagtcatccaagatggttgtgactcaaaccacgactcaaatcacccccgttgagcatcccattcccattaccttcgctctaatctttctctcagtttctgcatagaatctctaactatccctgtatgatctgcatagaagcagcactcttctttaagggcagcacacagtcctccttcctttaggaacaacaaatcaagacctctactgttctgcaaaactacctcagacagggaggtcaaagatttttctaaagcgtcaatggacttctctattgccgctaggtcttcattgacagcatccctcaaagactgaattccctgtctcccttctatcaaagctgacactcctgtccccactcctactgccatacctattcccatgaatgtagccagggttaaagtaattggttctctttttgactgctggccagcatagctttcttctaaactggatgcagggtgataatatacgcggggtaacagctggatcatgacacaaaaatcatgagatgaattaaaaaccttagttgatacacagggagtaagtcctatattgcaagcccaccagccaacctgggaaggtacaagatagtaattagcttccgtcctggacacggactgaatttgtctgcataggtgtttgtgggtggaaggtggggtgcctatacagagacctgtactcctcgcggatacttcagtcagggtcagtttttgtcctattccccaagagcaggacgtatggctgctggttctgttgaaatctccattgaaggcaattccttcatagtaaggaggacctgaggacaggcatagccagcagtcctcagtagcacttggatcagttctattaagggcataaaaggttcctctcactaggttaaacatcctctgtcttgttgaagggattgtggaggtaatagttagaggtacttgaagagtgggaggttgggtgagagtgaccatattaagggggtccgcaatcaccggagtaggctgagtaatggtatgggtaaggggtgtggacttggttggagggcctaaaggattgtagagggtctctatttttaatctgatagtgaacaataatccctcatcatatctttccttgtaaatcctaagaccccaggtatacccttttgtccatcccagagctcttttccctggttcagtgaaggtgacaaggagtggatggcaccagtcagtacactcatctaggtcaaatcctccaggtacttaagacgctagggaatagttggctgttactctaatatagtcccagcttgaggagggcttccagcgggctgtacctgaagtctcgcaaccccagctcttgcaaaagaagtcagtcttacttccacatgttggattgagggactgacttcggtggggcccggggcagacatagaagtgatgggtttgaagcatgcttctatccctttggttagagcaaccaccccatgggtctctcaaatgtttttctacatatggagggggtgttaaaggtgccctctgaatgtcagagtacccctccaagtcccatccaggaggggctactatagccaacttacagatgtcagggaaaagatcaggccaccaagtccatacggggtgtaccttggcaattgtccatacagccctacccccctcattgagtacctccaacatttgttgaacaggactgagggggttgaagtcctttgggattgctcctacaaagcaggcgcaacttaagagggttagtagtcttctccaaaatccactcatcatggctgactccaggggttgctctcttgacgtgggatgcgtggacccaagtggggattccttccactttgaccacagtgggcgttgtcagtagcaccaagtagggtcccttccacctcggctctaggttccctgctcggtgtctcctcaccaggactgcgtctcctacttcaaactggtgcggcacctgtgtgtcaccagcaacataggtttcttttagctgttccaagacttcttttcttattattttgagagcttttaatcgagccaaaagactagaggaaggagagaaagacacatccgggcgattcttataccctatggtcataaaaatgggcgggggcaccccatacattaattcaaaaggggttaagccaaggggtccagggatattttgaaccctgaacaaggcataagggagaacggctgtccaatcacttccgctggtctccagggctattttagttagagtctcttttagcgtcctattcatcctttctacctgtccttccttctgccagccttaaggcttgaattagtgtgataagttccgctttttggtcttatataccctcctgcaagctgctggcccatatgacagactttccatccactactgctgcctcagccctccgcttaccttctaccacgaagctgctaccattggtgaaccaggtcatcgcccctggccatggttggtctgtgaggtctggccagattccagtttcttctgccagtatttcctcacacttatgtgcagaggcctcgtcagcctcaggtagtaaagtagcagggttgagaatggctgggggtgcaaaacttactcgctctgccagtaataggctctggtagtgcatcattctggtgccgatcacccagcggtccagtggttgcctgacgatgctctcaagagagtgcagggccactatggtaacattctggcccatagtcagtttgtcagcatctcttactagcacagccgtggctgctatcgctcgcaggcaggagggccatccgctggccacagagtccagcttcttttataagtaggctaccaggtgcttccatggccccaaaacctgggtaaggacgccccttgccactccatttctttcatcaatgtataggataaaaggcttgctcacatctggcagggccaatgctggaacctgcagtagcgcctgtttgagagtttgaaaggctagctgatgttctctggttcaggtgtactctcctttttctttggttaatgggtacaatggggctgccagagtggcaaatccgggaatccagagtctacaaaacccggcagtccccaggaactctcttacctggcgagcagtggttggggccgggatctgcataacagcttgttttctggcttctgtgagccaccgttgtccatctctcagaacatatcctaagtaggtcacttctttccggcataactgagcctttttagcagagacccaataccccagcttacctagctcgaccaggaggatttgagtcccagtttcacagtccttgcgtgtttctacagctagtaggaggtcatctacatactgcagaagagtcacatgtgggttactggctaggaaaggggcaaggtcttggtgtagggcttcatcaaacaaggtggacgagttcttgaatccctgaggcagcctcgtccatgtgagctgtccggctgtccactctcagaatcttgccatttgaaagcaaacaaaggctggctgtttgggtgtaacctcaaacagaagaaagcgtctttcagatcaaggactgtgtaccatgtccgagcaggtggcaaggtgctgaggaggttataaggatttggcaccatagggtgtatgtcttgaaccctcttgttgacttctctaaggtcctggactggacggtagtcacaggtccctggtgtttttactggaagtagaggagtgttccaaggggatttgcatggaccaaaatcccttgttggagcagcttgttgatttgggggcatataccctcttgagcttctttgctcatgggatattgtcggacccctataggggtggccccggacttaagttcaatcaccacagggggaacctgtttagccatcccattcctcctgtctctgcccacgcctgagggtatcgattcaaacagtcctgtaatccctcagggggcttcactttattttggtagagtcgatattcttctcctagttgtaaagttagctctagagtctggggcgctttcattccccaggacatctctggtaattgagaggtaaaggttatttgtgcttttaacttggttagtaagtctctccccaataagggcataggacactctggaatgactagaaacgaatgagttactcgatttcaccctatgtctactatttgggatgtggtccatggatatgacttttgtcctgtggccctgatcaccaaggttttttcgtttttcttcacttttcctagtggcgtcttgagtactgaaaattctgccccagtgtcgactagaaagtccacaggagtctcctccacttctaaggttaccttaggctcggggaggggggccgagccccattccccctagtcctcatcttctccaagagaaagcaccttcacctcttgcttcttttttggacagtcgctcatccagtggcccatttccttgcaatatgcgcattggttcctctccaggcgctgtctgccttctctgggtctccttggtccctgctatctcctgtctcccaggttccctaactgtctacctcttctccctttatctctttcttttacttcggccagtatcctagtcaaaaccttttcctgtctcctgtctctcctatcctcatcctcttttctctttctaacttttcatcttctgtttctctcttatgatacactttctctgcctctctaactacatcccttatggtataatcttgcaagccctcaattagctgtaacttctttctaatgtcgggagccgactggccaatgaaggccataatcactgaggccctttgaccctcagacgtggggtcaaatggggtatatcttctgtaagcctccatgagccttttgaggaagactgaggggggatcagtcgctccctgcataacctctcttaccttggccagattcgtgggccaccaagcagcacctctgagaccggccactagggcccagcgataattggacagtcgttccctaccttgtgccgtattataatcccatcagggccgggttagtgggaatccttcatctatctcagctggagtttggacaggctgcccagcctcatctcggacaggtgtttttccgagcctcgaggaaaatcctttctctctcctcggtggtgaataaagtctgcagaagctgctggtagtcatcccaggccggctggtgtgaatacattagtgattcgaccaaccctgtgtgtcctgcagggttctctgaaaaaggagggtgattagctttccaattatagaggtcggaggaggaaaaaggccaatactgtaagggctgcagactatcaggatcggcagggagagccccaataaccctgagggggagtgccacggttgaatcagcaggcccctcagggggcaactcctcgccggctccttgttcctgtggaggcaccccctcctccggccggggcctgaggcagaggtcccaagggagctgaaggttggggctggggagcatatggtggggattgaggggtgtcgggacactcagggggttcttcaatctctggatagatcttggggggttttgtcacttgtgtgctatgttcatcatctcccccgagcggtggtttcagtttctctttctcagcattttcccagatggctaggatcttggtgccagggcagagaggtgggaagaatgggcgaacccacaggggttagtagcgtgccaagtcctcccataccgtgatgtatggttgctggtctgtatgcgaccctggcccttcctgaaaaacaatggccttcacagcccttatggtgggtaagtcaaaagttccttccagtggccaacccactccaaaaacagaaacagaaagtcatccatggctttttcttcactattactgacaaatttcgtcctctagccctaatgtttgtccaatggtccttagtcaaaggagtagacacggtctgtcccatagttaagaataagaataaaaacaacacaatgacagagatggaagacactaagacatctaaacacactcgtctgcgtctggacttatacaaccagccaaacgctacctctgatggagtgggattccgtgtccactccttcgctggcaggaagagcactctctctccttcactctgccaggcaacagccaggtcctcctgactgttccgtaccctgggcacaacctccagggtctccctttgaatgtcttccaggggtgcagcctgcgggccttagggcatctccctccgcagccgtgggtccttacggtcctcaacggcagctgccaaaatatcagactccgaaaaacaaaggcacagactcagtggctgcacaaacacaccacacacatacaaaacgtacctccaaggggtatttcgagtccttggggacccctcaaatcccggacgagcccccaaatgtaggaccccccaagaaggagccccccactcaagtcttgggactcggggttacccaaagaaacatgagagaccttcttgttgcaaaagcatgtggcagctttaatggtggagctctgggtcgatacatatctcacgcaggagacagaggaatcaaccctgagactcaaaaactcgaggtttttatagggtagggtttaggggctaggaagaattggcgcggttacatacgattggcccattcaaacatcagcaacatgattatgagtcagcagagtagtacgtgcaggccggggcgtataaggattctgaagctgggggcttatctgagtcgacattgtatctggttaatgtttcagcttttaactatgctctctataaaaaggggggtgagcaggaggcgctgggctaccagatggtcaatgagtcagccaagatagtcagaaccagttcctgcattccttcccttatccttacgaccaggtgacctagcttcaagacggactcgggcatgcccgggctttttttctttgcagtctcagtcccaggcatttttagtttaaaccttttattttgtttaatttcctttcagactcaagatcaaactatatagctaagactatcttggaatttgctgtgtaactcaggctggcctcatattatgaatcatcatcatgtcttggcctccaaagtgcttagagtgtaggtatatgccaccaaataagtctgtctgtctgtatatatgtatgccactcccccacctcttttgactctctcctccctgcatttctttctttttgactgttttgctacaggctctcctattgcctggactgggattgaactttccctggagctatggctgcccttgagctccggctcttccttcccctatcttcaccctcccctggggttatggatgtataccgaggtgcctgcctctgttttgtttcttgattaaataaaagaaatgcttaacttctgccccaagacagtagctttttggtagttagtaatgcttgaacacagaaaacacagttccttagactttacatcttaacaggttacagtacccaaaagagtggactggaacctttcccttggcaagccaagagtaaggatttaaacacaagagtaaaggatttgggtacatttctgccccttattcattatgactagttattgagaaacctgtggtgtagtagtagtagaactggtatggcctgcttccttgtagagctgggctggctagctcttgaagcatgctcttgtatctttggcttctgtaagaggctgtgaactcaaatccagattggctattggcggagcagttggatcttctggtatttggcagagcgacacatattctgtctgcacagttggtagggtataagctggaattcttggacactgagagtatctccagaccccctgtgagttttctccctggcaagtcttgagtcctttggcttccacactcctgcttgacttggcccagcatcgggcacatggctgagtggaagaactttgtacacagctcccttcagatccttatcagattgctagtttccctcatagaaacccctgcaggtgccacaaccagcatcacccacttgtccctgtcccagtctggcggagactgaaagggactgcaagaattctttctcctgagactgctctcttctctaaggtcttagttgttccactctctctgcctcatcaataaagcacttttgagtagagcatttaccaagtgtatccagcctttccgggtgcttttggaggaggggtagcattgattatcacaagttattctacctcacctggggacaggtatcaaaagttagcatctccttcggttgttactatgattcctcttcccccccccttggtttttttccatacagggtttctctgtgtagccatggctgtcctagaacgcactctgtagaccaggctggcctcgaactcagaaatccacctgcctctgcctcccaaatgctgggattaaaggcgtgcaccaccacgcctgacctcttttttttttttttttaaattaatttattttatgtgagttcactgtcactctcttcatacacaccagaagagggcatcagaccccatgacagacggttgagagccaccatggggttgctagaaattgaactcagtacttttaaaagaggagccagtgctcttaacctctgagccatctctctagccctctatgattccccttaaattctaatattccacttaacatatactttattatgatgatgatgatgatgtgttcgtgtacacataattgtgtgtgaatgtgtgtgtgtgtgtgtgtgtgtgtgtgtgtgtgtgtggtgcatgtgctatgacacaccacgtagaggtcagagaactttgtgaatttgactgtctccgtccactttccaggtgagttctggggcttgaactctgggtcaccaggcttgcacagcaagtgctttaccccctgagcccatcgcactgggctatttcactttttgaattgacttctaaagcagaaccagagtgaaaagctctcaccagtgaagggggtaatgcagagtgttgctggggttggactcagcgttagaatgccttccttgcatgcacgtgaggccttgatctaacactgcaagagaaaacacagctttggatactaactccacctgattattatcccagttctctttcccctcctcttattttcttacttatttgtttttactctatgcaactccctggaggtcagttgcaatcctttattaagaggattcataataaaaataaccagagaagaattaaaagcacctaaatattactaaacttcattgctctaagtttggaagaatgctaactgactgttttttttttaacacatctccataagaagtaccattattatgattaagcagagagcacaagattaaacggtcataaaatttccatgttacttaagaaaggatgcatgtggtattcagaacacactaattccctttctccttctgggtatcatctattgagcactattatatcacatagaacgtgctgtggtttgtattttaacaatttctgaaacaaccctgcttattattaaggatgaggattattaaggattgttaaggaaacgttgcttatttttatattgctgggactgatacccaataaaagcaacttgaagggggaaagaattgatttttggctcatggttttaaaggcacagtttataacagcgaggaaggcatggcagagttgctggtgaggggaacgtatggaagaggctccttgtattgtggtggatcaagaagcaaaaagctctggctggaactagaagttgattctgctttcaaggttgaacagcccatgtctgctaactggaccacaaagttctacaacttaccagaacagcgccactagcctgggaacaagtgttcagatataagagcccatgacggacacatcacagtcaaaacatagcagaggatatggaatctaaagttcccaaagggatgggatgtagtagccagccttgtacttccatattagaaggacagaatcaagtttgaaacatagaatttttttttatttattcttcttccatatattacctcctgactgcagttttccctccctccactcctctttgtgtccccaactcctcccttccccagatctcctcctcctccatttcccttcagggaagagcaggcctcccagagatatcaaccaaacatggcaataccaagatgcaataggactaagtcaaaccgtcatgccaaggctggatgaggcagcccaatgggagggaaagagttcaaaagcagggaaaagagtcagagacagacccttttcccactggtgggagtcccgcaagaacatcaaactacacagccataacatgatatgcagaggacttagacccatacaggacctgtgattgttggttcagtcttcgtgagcccctatgatctctggttagttggttctgtgggctgagttctcattgtgtcctggagccctctggttcctacaatgcttcttccccttcttctgtggggtttcataagctctgcctcatgaaatatagaattgttacatgctgaaccacaagctgtatctcctataacttcacagcccgtgttatttctaacccagttgttttttgtttgcttgtttgtttgtttgggtttacctctttgttgggacaaaaagcttgctgttttcccatctactggttcatgtatgtaaccaggaagagcatgccatccaatctgtaactccgtaccctaaagcccatgcattcagattttctttcctgtctttaatatttgtttctggaaactatctattcctaagaggatatcgaatgagggaaagcagtctttgtgaaatagacccatgtgtaacaaacccagagcctgaagaaaatgactgacctaataatagtcttgcttgtgcactgcagtgtgtggggagcaaggcccaggtgacaccgttgactgggcttcttctttctagaactggaagaagtaggttgaggtggcctgagaaggaccagggctgagaacactggatttccgtcatggttacgttggtcgtctgtgagtttctgaacgagtcagttcacctttctgaggattacaggttctgatatcgagtatggaactctagggttcagtgagttaaaatttcttccctggatctaaaattttgtagtcatagatatatctttagatcattagactggcttatgataatctgaccctgataatctccctctatcaaacgtgtacctggggcgagccaggggtcatacttctgtgcttagacctttcatgtgccctgtgttttcctggaagccgcatatagcatactcagtgacaggcaggccatgggctggagctggctgtcgggggtaaacatcttggaacaagcaatgctttcagccttacagccttggctcgagagtatgagaagtaagccttgggaagctgggacctggtggcagctgtttctcctcggtctgcttgccaaccctactggagcttgggatggacagagttctcagctgggcctactgtggctgatgctggtagttttccactctgggaaactggaagagtccgttggcatctctgtcaggagattggtgggtagcggaagcatccggaaaccaccaagacaactcagcaagcatttttttttttcctgcagtgacttttgcttcctgtgacaggctgctctctgtacatatttctttatatctcaggatatggactgaataggggagtgtaatccagggaacgggcgcgggggattggaagaaaggagtcctgatgtctaggatttgagccaatgttgcagttctgtatcttcccaaatagctgagatcccttccaccagttacccaaaataggcacattcaataggaaaaccacaccggggctgcagagaagcgccacgttgggttccctgggccaaggcttcttctggttccaacgacccagcgggatgggtaaggctatccaagatcagctcgcactcttcctctgcccttcccgtgaggcccctgggaacactgaatcatggagaaactctgcttacttattttatgttacattgctgctttatcaactcttgtctctgacctccctgtcttcaaccttgtagtcctcggacctggtttctagatcaccagcccaactcccattgttgtaggatgactgaaaagttggtcattctttatctggggttttgcatcccttggtttctttgtgtagtcaatcacagtctgaaaatattagatggacaaagtcaggactaatttataaatcttaaatgtagtgattgggactgaaagaactaaatcttgagccccccccccctctgtcacacccagtgcttgtcattcactgcactttatctctgtatataagcaccgtttcgccttctggaggcaagtgggtgtggttcaataagatgggagagaggctggggagatggctcagagattagaagaccttgctttgcatcatgaagatctgcattcagatcccagcacccacagcaagctgagcatcccacagctgcctgtaactccagcccagaggcattaaacactcctttcaggcctcagtgcatgcaagttcacacatctgcatacatatgtgtgtacacagacacgcacacataaacaaaataaacagttaataaatatgtgagagctacattcacataacttttacttgggatatcataattgttccattttattattaagcattgtttatctctcactatgattagtttctaagttaaactttattatcggtatgcatatgcagggaaagacaaaagagcttgtagagggctttgcactatcagctgtttcagccaaccatcagaaaatatccccttctagtgaatggaaatctacagtgacccttgtggctcagcacctactctgacattgaactgtgagtttacatcatggaacagaacaagattcttgtcatcccttaggtcgctagtcactggaggctcttctaaccaaacacccaaaactcttcctcagtcgatctttgtgactagttatccggcagtgctaaggtctatgctgtggcttctctttgtctcctacacataatgtacacccactgttgaactaagtcactgcctgatgagagacagttgggcaagctgctgcctcacaaatacttgctgaaccccacagatgacaactcacttggggggttctgacctagaaagcctctactgcacttgcccttcaagatctaacatgtgaagtgaattgtttccattcttctgtctggacatttccatctatctacctagctctccaccttttcctacttagctgtttgtccagtgtatgttgaacacctaatcagagttgtgagtcagcaaggctgaaagcggccaggaatccaatatgatgactatgctctggaaggtcaagagatacaagtgtgctagaaaattcacagtgaaaattatttcttagaagaacctgtcacttgcatcctgacaccatattttagtatttttgatactttgtcagactctctgagaccatgatagcaactgtcaaataggaaagcaactgtatctttttgatgtctgaatacctgttgtctaccatttgtctcttggaccataatggaggtctaggagagaaatcattttatgacttattcactactgactgattgtataaatgcaagaacactcactaatgggcacatttgttaatgctatacgtgaatggatagattgcaataaagtaagcaattctcggatttatggggaatccttttctatttgttatctgcgtgactcaaggtttcccttggatgaattcccaagactacatctttaagtctctgggaagaactcagcagtcctctgacactgcatagcagagtcctatgtggtctttctctgtcactccctctgcctgcctgtcaggcacacttctgatctcgtttacttcatttttctatatctgttaagtaggggaaaattcttgcacggagccaattacaacatgacagaaaaaggattcctagaaatacaaccctaccgagatgcattgtagtggcagtggcagtgtcttggttattgtcccacagaccagcaggccccacgatgggaagttatttatgatactatcatgactcaccttgttggctgttcccaatgcctggcttacctcatgtgtcccagaggacagaggttctcgttacatttacagccccacatctggacacatgtgatggatgggactgtggatgttctatgctgcagctgtcagcagggcccctgagcgtcattctctgtccaggatggatgggatctgggagcggacctcagagcccaaacccacagcaggataactgcatcttcaccaacatgcagctcctgggtttagttttcagatatgctagagttacagtcgcaaagatcttcacatgtaggcagcaatcaggcaagagtctcagggccaaaatggaacaggaaaagcaaagatgggactaactcttgctctcagtgaggtgtgcttttcattgtcagttgttcagagcacacttcaggttcttcaggctttggagatgagggtctctcaggccttcagcctcctgcgggagctgtagtggtggcttctctttgcgttcatttgctcacgacctggactgagcagcccctagttctcctctctctgcctcctgcagatgggcccggaggtaccattcagtgtcagtgtgtgcgtgtgtgtgtgtgtgtgtgtgtgtgtgtgtgtgtgtgtgtgtgtgtgtgtgtgtgtaacatgagggtccaatttctctcttggaaatatggatatccaatttttttcagcaccttgattgacaagactatgctccccgccccctgtgtattttttggtacctattttgaagatgggttgaccttatatatgtgaggttatgtctgggctctccattccattgcattggtcacatttttaagtataggactactttaattactacagctttgtgatatattttgatatctaaactcctaatacctctaggtctgttctccttttaaaagaatactctagggttttttatttgtttgtttgttattttgtggttttatatttctggaaaaatttctggctttccagaaacatccattctttcttttccttcgtcgtaatgattccatttcgtttcattttcctactcatcttttatcgcgtagactatggtgacttccgagtgtttatagttacttgttttgtctttgtaactctggaagtccactcaatcttgcctgagctctcactcctttgctgtaactgggcgctgtcggggcgttgctggctcctttgtttcccatctctccaagatggtggtccattgttgtctggtgcccattgtttgaaagctggattatttcccatagggaatttcatacgctctgtcttattctctttgttgaaagtgaagcccatccctgaaactactgtttctaacaggaccagcatgctcagtactaacacgggacagtggattgagctgtttcacagtctcatacaatctgctccttagtaaaccagagtgcttctacccatctagggctacctgatggctacaaggataatgctacttttaggaaattgatttaatatgtaaatctgatagtaaggaactaaggctgggactattggggttattactcaatacaagaagaaatttgcacattaaattatattacattagtcagaatttgggccaaaatgtaagtttggctgttggttaaatcttggaggtatttggatattaggattaggaaaaagctctgtagcatcagtgtggctggacttgggtcatagagggatctaggaagatttcaagtcccctatttcctgttctgttaccagtttcaaccttcttggggactctggactaaaactgaaagcacattctctgttttctctctgtttcctcgttccagccatatgccgctatcctctgggcatgtcaggaggccacattccagatgaggacatcacagcctcaagtcagtggtcagaatccacggctgccaaatatgggaggtgagatagctttgtcaagaaggcctaagtgccagggggaggggagcagggggaggagggaatggctacacagccacaactcaagatgctgggggaagggctagtgctggtgagagcttgcaagactggaagcgagatgtgaaggggtttgtgctgcttggaatgtttcagagagaggcgaagccttggctgcagtcactggcctggaaacctcttcccaaccacagaggcctcagaaccacaccacccactgtgaatggggtcattgataggcagtggatttgctttaccggacctcactgtgggccgttgtaggagaaaggccaagggcgcaggtacagagaggtgtagattatgtaggacactggcagtgagtgatgcctgcgtctcaggaggtatctgaaatgccactgggcagagtgtctatggtcaaaccagacactgaggtttccagtaagttcttccttccctcaaggaaacctcacacagaagggccatcctcatctataaacagagcaaattctatgtggagtatgtaattcccaaggtccctaaatgaacagactcccaactcagaagctacgctgatgatcggacccttttcttcctgctagaacctaattatttgatgtaaatttcgtattgattttgttaaaatggaatcacacatgaggcaatcgacccccataacctccctcatcatacctgtcttagtgtttgagaggagagagtagtgtggagttatggggggaatgagaaatgagtgggtaagctctgcgaggaaagggagtgtactagggaagagggagaaaactcagagggtacttcaaataaaccttagagtgatttctcaatgccgttcagtggcggtctagcctggagtagtaaatgaacccaggttattggtcattccctcacaggctttccaccctcaccttcaccatggctcccatggcttttgctgggttgccatgcccattctgctggctagcattccaccatactgcatagcccacactgaagacctacctttcctccctactccttcctccctcctataacttgatacccaaaccaggaggagcctgctctgtgagattgtggctgaggaatggacgtggacagggtgaaagaattccacagaggagcatgggtggaaagggtttcatttccctagagttctctaaatcaagattaaaaggctacatgtgctttggaaggccccagctccattgtggtgactctccctgggctgtgtggtgcttcagagacaggaaacgaaccacaaatgggaatggttaggacagacagacaccatggggaggtcccccaagtccctctggactagactgctggttttcactctctcctcaggcgcagggcagctgcctactgtgagctggtgagtgtctcttgtttcacagttgctccctctcttccctacccttcttctcaaggctggactctgaagaaggagatggagcctggtgtcctgagattccagtgcaacccgatgacctgaaggaatttctgcagattgacttgcgaaccctacactttatcactcttgtggggacccaggggcgccatgcagggggtcatggcattgaatttgcacccatgtacaagatcaactacagtcgggatggcagtcgctggatctcctggcgtaaccggcatgggaagcaggtaagaagaaaatggccacgctttgggggaatataggactcaatagttgtcaatagttcaaactgtgtatgttcaagcccgatatgacattgtaaatgtggcatggtgtcagttcagagttgacacagaggatctgttagctctgctgagagagttgagtgactatattctgctcatgaacaaggagcaaagtgtccatcaaatgcatgattcatgaagaaaggtgaacatgattttaaaggtctctgctccttctcatatctctcctaggtgcttgatggaaacagtaacccttatgatgtattcctgaaggacttggagccacccatcgtcgccagatttgttcgccttatcccagtcactgaccactccatgaacgtgtgcatgagggttgagctttatggttgtgtctggctaggtaaatctcgaccacagagaccttctgaaccatagagaaacttccaagccccaagaactaaaaaccaccaactcagaaagggatgaaatcactcccctttggaatgagattatttccttttggttaaaagagaagaatgagccacacccatctacccagggcttggtgccctgtggtggaaatgacatattcagagttactcaggtaactgctgttgtggtgagcttcccaacagtgctcaactgttaacccggattgaaacccagtggacatgatggacaagctcatacttccttggaagcttaagtagctccctaggctaattggttaggcagcaggtgcatctccttatcacaaacgctgaccactgtgtttcctttggcagatggcttggtatcctacaatgctccagctggacagcagtttgtactccctggaggctccatcatttatctgaatgattctgtctatgatggagctgttgggtacaggtaaatactaggagatttaaataaccaccagaatagaggaaatggccataacaaatattccatcaataatcaaagagtcagtcaatccaccagtattctgcacatgtgtgatacacggaaataacttagatgtagttatttctacatctacatatataaactgcatggtgtttatctccattttgaagttgacttttggaaaacaaaatagtaataccgtagacaggagaaaaattacacaaaggaatagctaaactttgtgatatttttataagtgtgggagttatatatcctgaaatgaggatgtatattccaatctaaaggctaacttggctatagatacaaagtaagaaataagattggtcaggtcacaaagttaagaaacaatgaactccataaatatagtactttagaagctgtgaaaagaaggagctattaaggcttgcaatagataagagaagctcttaggattagatgttaatgaaagcaggaaacagtaggtagaggagtggagaggaagaaatggaggaacattggtctaattatggcagaaacgggtgagagcagcagagaggcctgaagtggacagatgaagagctgtggtagaaaaacatcaccagacacattggggtacagagctgggaaagacatgtgcctatccattcaatcattacattcttcttctggtccattgctaatccttgtctttcttagttcagtgtttatctgtaagaatattgtgaaatatcgatccaacaataaagtttctaggggccaaaaaagaaacatattagtgagtctcaggaagcagattgtagaatgacagacagcctttctactggctcaagggtggagagtgaactatctccttcatcagccagcccctgggtgaagtctcaattcatccagtcttctagccttacttatttcctttccatctgcttagtcagtcacttctctccactctcttacatcatcttcacattgtttgactcagtcacaccctagctagcctagacctaaagcacacaggaaatgagataccaattggatctttgctagtcagttgttatgtgtgtagaagttggctaggtgttgtgggtaattaagaaaaatgaagccatgggtctcatgcttaaggcattcatagtttgggtcaatggctatgtgagaagattgattattctatgtatttgttgctttttttcattgctatgaccaaatgcctgacaataaacaacttggggaaggaagattccatttagttcacagttcctggcaggagaaggtatagcataacaatgttcatggtggtggagacttgaatgctaggagtagtaagaaggatatcaagaagtcgggtggggatggagcagttttccttttagcacagtaatttccttttaatatagtaattcattgatgatttttaaagttacggaaggatgtgattggagctgagcttcaggcagattaaacaagtagctgacaaagattagatgtgagttctagtggggcatactttaaaatcccagattctatgatgtaaatatgaactagtagccaaggccacaatggtactcttggaaataaaatagggaagaaatgttcatttgggggattacaagcatctaaatcaaattaatattaccctaatgatctctttccctgaatcaatggagaactcagtttcacatcaacaaatgttataaaataacgagtgtttactgcattagcagaaaaaccattgaagtgctgttttattagtttgtatgacaagccttcgttttccccttgtgtcttttcctatatgtattaatatggtgtcttggtataatggttcaccattatcaatggcatctaaattagttcattagtgggggaactaatgaagaacatgaagagcacagcccttgacccatcagtgaccaatactggttggacgcatttgcatcccttcctggactgcacaattcagaaaaggaaaccactagataaggtgcatttgaaagatttctcctaatccctccacctctatagttatcagctctttcaaaatccagcagtgaagcaatgggctgaaaagttcttctgtggatgtgtgagtaactccaggcttctctcttctctcctcttcccatggcctgagcagcatgactgaagggctaggccagttgactgatggagtatccggcctggatgattttacccagacccatgaataccacgtgtggcctggctatgactacgtgggatggcggaacgaaagtgctaccaacggtttcattgagatcatgtttgaatttgaccgaatcaggaattttactaccatgaaggtcagtggtagattctcttcaagaacctcaaaattatcgtgttggggggaaaatgcccgatgtgccctgagctgatgttgacagaactagattttaaaatatattccactactacaagtatagatgaattcagagtaacatcacttttaaaggttgtttcttcatttgttaactctgcacaacaggttagacccattgttattgagttattctcttcttccctccttccttccttccctcctttctttccttccttcctttcttcctttctttccgtctttccttccttccttccttccttccttccttccttccttccttccttcctccctccattctttccttcccaacatcagagccaaacattttcatccaatcagacataacagttatttcatcagtacataactgcagaacagttaagtggacattggtgagtggtaggatggaagccaatggcttggtcaaggctgcgctagaaggctgtcatgtgatgggtcacctcaaatatgaatatgtggcaagatctgaagaaggaattttaagtcctagatctcattttgcctgaagtaagaccctaccagggagccaaatccttatgccacccttgataaggtctttgttataacataaagggtttcctggtatgttgtttaaatcattattttcttttgccctcattctatccttggtctgttttagagagaagggcatgggaaagaagaaaagttcatgcaaaaagtaactagattggatgctaaatctaaattgtagggttagggaaaagtagaggccaggggtgtgaaggaaagcctttgtgttcaatgtaggttgaggctgcaggatcttatatggtttgtatataaactcctaatggtctataaaagagaatgaggaaacctcaataaaagtctcaggaaagggtggacaaataaatttggtcttccacgtgcatgttcacctatctgcccctttttcatatttatattcatgtgtagtagtaatctacaaacttggtaagccttcctcagtagtcttcagtctatagctgtttcctgggttaaatggaagagatcgtaattatactatatatttaaattttatctgtttatctgtgcttgttttggttccacaactatatttggagcacagcatgctagattctgagtaaagaatatttcctatcttgggaaacattggtcacaaggtcagtaggaaaggcaccattaattttcaaaagaatgcatgcgggataatatgggacccagaagaaggaaatatacatcagtcattattaagggttctctctagggcaaatattttattccttacacaaactaggcttaaaaaaatacttgtcttttatattactctcagatgttaatgcctatctcttaaccagattaacacttattcattaaatgaacaaaacatttaagatgaggacagaaggaacaacatatgcccactctgttggtttgttgttggaaggtctttggcaagtgtaaaacatatgggtgtgcaattacatgtaacacattattcttcagagatttttgtagatatgaagtaggaaggggcaaaggaaggagtatgcatagcaacaaaaatattcagtaagagaaaaaattatttttgtattactttttaatatacctgtgaacatacacataaatttgtaagtttatacatgttggggaagatttgtagtttaacaaataattaaacaaattttaaaactatctgggatcttataacatctcaccagcaaactttgatcttcctgaatctccagaactccttttagctcattacagatcaaaatgattcaagagtttagatcaagaagccagaagtttctaagtaggagatctggggcagcctcttcaggcaaacatatcctccacatggtttaattttcatggggaaaaaaaagtgaaaaattactttcagggaactaatatcttttatagagcaggtttctttctgaggcaaattactcctcatctcttgctttgaagaagggttaaaataaaccattaaagcttactcatgcattcaaagtatattattttaataaataaatatgtaagcccacattggaatgaaatccattgctatttatttgcgttccagaagaattcttgaaccatctgtaggaaagattattaccttccctgcagggtacttacccaactctttgtagatttcagaacatctgaaaaacctattgaagctggagatggtatttctttgacgttttttgcccttagcctcagtccatcgacttggggtcaataaactaagatgattacttcactccaaggaagatattaacacatgggttcatcaataaaacctgtggagaaaaaaaaaatcccaatggaaaagttaaggtgactgctacatttctatgtggtatgagggcattgtaccagatgtttagggctctccttccaattgtgttgcggactggacataggtcaggaaaacacgtgagtactcctaccttgtcagtacatagatgaactagaaggtttctacacccttcagtagctctcatgatctacccttagaatatcccggttccagttctctgccgtgacgtctctttcttcattactcttccttcttcatctaaaaagtgaattcagcctggtagtcctgcactgcctacctagaggacttacagagttgcacacagtacaacccagggcttaagcaggcctaagaaacgggaactacagtccatgaatgacagtcacgcctttctaaccagtgaaattcttgagggacaatggccaggaaagatctgttttccccattaagactgagtcagagcaaatggaaccaaattgctgtaagggccttgagtcagttgctaatatacacattacactttttttgtggggtactgaaggactgttgtgaaatttctgctcttgatgacctcacaagccaaaaaaaagatcccgctgaaaggtcatgagtcaggagagtaggtgctagctacctcccacctgacttcttgtctcatctcagatattatcagtgacaaagatctgatgctcccatctgagcggttgtaaattaaactaaatttaagtctgtgtctctggctgaaagtgtcagtccatggcattccaagcgagattgtcataaagaaagatgaaattgaatttgcttgaatattattttctttcaagtttcccacattgccttcctgaaaaggaatggtctgccttgggaaggtacctgggaggaagcaggatgctaagttggctcaccatctcagatcagaatagctcaaatatgggcagatagcacgtatgattaaaaagattacagagccaagagaattcctgttgggaacagacctgggaagatgctaatctagctctcacttaacaggtggggctactacagactaaaactgtgaaccaggtgaccagagcacacagttgcaaattggaaactgggttttagaaggtctgacctgggtatcattgccactgtccagaagactgaattatgggtagtgtttagagaaatgggcaggactaggatttcctacataacccagaagggccagcgtgtctctttgacctccctctctctgccaggtccactgcaacaacatgtttgctaaaggtgtgaagatttttaaggaggtccagtgctactttcgctcggaagccagcgagtgggaacccactgctgtctactttcccctggtcctggacgatgtgaaccccagtgcccggtttgtcacggtgcccctccaccaccgaatggccagtgccatcaagtgccaataccattttgccgacacgtggatgatgttcagcgagatcactttccaatcaggtagaaaaacctcgggggctccacagggaagagagtgggttgatgcaggaggtaggaagtgcatccgtgctgccccctgcccaggtctctgagaggaacgggtttcccagatgccttacaggttttggaaagagagaatcctttgtgtttcttgttttatattacgtaattataagaaccagagtggaacagtacaaactttattagactctcttacatgtttgtctagaaaagatttatggcaaaagattgttaaaatgtgccaaaagctatacaaattaagactgttaatgggaagcatttaagtactaccaaagaattcaaataaaaatccctagacattatgtacaaaagtaaagacaacaatggactcccatctctcacctttattactaatcattgtcacctttgttcattctttcttgctgtggtatttgaaaacaaatctgaaacatatttaggtttattactagcactttggaatgcatctaaggaaatattttcttgagtacaatgtcattataataactcaaaatatttaccagtaacttctaaaaatgacttaatcgtctttgagtaaacagtagggttcatggaaaccctgtgctgcgccatgccttgaaaagttaaatgggatttatgacttcatctatgccattggattttagtttggatgacaaaaaagtggctttttagaattaatctaaagtaccaccaagcctaaccaatcaggaagagcaaggaacaaaacgatgggctttcctacatagtgacaaaggcgtgatgctgcatccggcctgaaagaaaagtataagcataaaataaaatgatagggagagagagaataacctagctgtgggttagaagataagatcctttctgccttgagtttttgtcttaattttggttgtgagcttagcctttaatgattgagccatctctccaaaccctggcttgatatgtttctaaagaagaaaattccaagatggtttatttattagcctatgctaataggataagagagtgtgtatatatttagaaagcactggtgcctacatgctgtctatgccaatgtaatttaaaagcaagcagactaattagttcatgtaatatattcagaacagaactgtatatgctcaaaagaggcgtgcttaaattgtaaaaataatcagaagataaataaatactatccctggagatcatctgggtgaaagaaaacacagatgtccacctactggtattcttggctattcttggcagagcaatccaatgaattctctctacatattgttgaatctaggtccttctttccatgcatattttatgatgatctatgaccacagctctctgaaacaccatgtgctaatgttttatattctcataatatctaatatttacatttgtcttattttggccaagcacagcttggactaagttttagattccttgaattctcttaagcttcaaactgtatgtcttggtaatgttattttcttctcgattcttaagaacttaaattaacacaaatagttgatgccagaaactccttatttgtataataatgctaagaagaaaaagtaagatttgttgaaagaatatcttgtagaagacaagttcatattttaattattgacaaatcagaggtaaaaaaaattgattaccagtgtccatatggcaattacacttttgaaagccagagcctcacagtaaagggcacttcaaagacagttttctatctctagggatggataaagccttaagctgagagttagagcaatgaaggacaatgaaaaatccctttagaaaacaatctaaattgttccatttctttattgtttaattgattcaattcttgggaggaaagactgtcttcatactaggttgatttcatgcccatatatccaatgaattctctctacatattgttgaatctaggtccttcgttccatgcatattttatgatgatctatgaccacagctctctgaaacaccatgtgctaatgttttatattttcataatatctaatatttacaacaattgtttttgcactaggaaaaagtatctttacttgtacaggtagttatactttattaaatgtatttatggatttattcttactttgtttttcatagacattatacatttttgcatttacatactgcagtaaaatgagttgatgcatgtataatttttaaaaacactatcggtaacccagtacattgacttttacaatgtactatgtctcaggctacgttcagatgtgccattgcctggctgtctgttcccagtctctaattcactcttgttctgtgacagatgctgcaatgtataacaactctggagcccttcccacctctcctatggcacccaccacctatggtacgtgtgattagtacttgtacaatagtaagatgaagttacctcctggaagacaaagaagggtagagattgcaactcttcactgtgtgtgagtggcttgattccatgtgactctgaatggatacttgtgtggtaaaggaaggacagtccacccccaaagtgaaggacccaaagttactctcatttgtcaccatccatgagttacttcagctgagaggggcaggatctagagtgttacaactcttccatgaatgattaagaagcttgggggtggggggggaggacaagtaaggaggcattcctaaatgagacccatcacaatgatctcatgaacaaggagtccatggaacaaaatcttttctatctcgcagtagatgaatatgcaaaggtacattctttgcttggagaagtcactggctataacagccggcaatctggaaacatgtttgattgggtttcttctgagaggaatctcagctcctttgacccatctccaagaatgaagagtgcaactcattcctcacctatactttcatgagcattaagaacctattccaaaccacagagacaaaatgtggggatgcgtatgaaaaccgctcactatttagtcggagacacagagagagggaaggcggtgacccatggaagaagattgtaggaaataggagcaaggtaataagcaggagccaaaaaaaaaaaaaaaaaccataaatatgaggatggaaccttctggaattctcctgaaagaccagggatggtctccatgctctcctctattccccactgctctcatttgccctaggaagtgaatcttttctctgccttctctaattggtcacagatcccatgcttaaagttgatgatagcaacactcggatcctgattggttgcttggtggccatcatcttcatcctgctggctatcatcgtcatcatcctgtggaggcagttctggcagaagatgctagaaaaggtgaggatttgcagtatgaacaggaactgtgtgtcttagtcagggtttctattcctgcacaaacatcatgaccaagaagcaagttggggaggaaagggtttattcagcttacacttccatactgctgttcatcaccaaaggaagtcaggactggaactcaaggaggtcagaaagcagaagctgatgtagaagccatggagggatgttacttactggcttgcttcccctggcttgctcagcttgctctcttatagaaccaagactaccagtccagagatggcaccacccacaaggggcctttcccgcttgatcactaattgagaaaatgccttacagttgtatctcatggaggcatttcctcaactgaagctcctttttctgtgataactccagctgtgtcaagttgacacaaaactagccagtacactgtgcttccatttcctgtactgccatgacaccaggaacaaagggcaaattctaaaaagttataattggctaatgagttctctgaggtaaccgagaagcatcggtgtggaaaggctgttgaagcgagcccagaaagggattagccgagtctagttcctcattttcagaatgaagattgtggaatctgccttaaaatcttaggaaagcgtttctagtacattaaacctcatcttgggcatttcccatgaagagtcaggtttattggttttagttagggtgcaggcacctgtgtgtgttttcagtatggcgcagttctgacggccagtcaaggttggggtcactcttgatcctgttaccctttttgaccttttctaaacttcttgttcttttgctttttaatgtcagattacttacttttcctggtgctgtgacccaatatctgacaaaagacaacttaaggatggctttattttttatcacgacttaagagaggagacagtctaccacggcagggaagggatggtggtaggaaggaagcagccgggtaccctgtgtcgacagctggggagcagagagagatgaatgctggtattcggcttgccatctccttattcattctgggatgccagtctataggatggcactgcctccattctgggtgggtcttccttgctcagctaaccctttctggacattccctcttacatatgcataattatgcttctgaggtaactctaaaatccatgaagttgatgatggagcttaaacatctctctctctctctctctctctctctctctctccccataaaaataattaggttcattaatacccaagtagtttatcatcatcttaatcctatttctttatgtatttgaaggtcatgattatatgttcctaaattcctcaaattactgagccaaatgacatgaagttttttattatataacatattttaaagatatgttatataatattttaatatgcaaagccttatttctcatgcttgttttttgtttggtttttggggcagtctcctggtatagtcctggctaacctggtgttgtagatcaggatggccttgaacatgctatggttctcctgcctgtgtttttcctgagagttgtcatcataggcatgtattggcacattcagttcacacatgttattttatatgagactctgagtaatggttgcatggattatatttagcttgtcctaatgacataatacatactcacagggcaatctgtgttctatcttatggtttttgtcaactgcccaaaattgatacactttcccaatgatgaggatgaggacctataattctcccagacttcttaatcattaaagaacttcaatggacaatgctactgagtgactgtccacctttggatctatcaaaatgtttctggctttgaccatttctgacaagtgggttcaatggctttgggctgtgagtgtctgcagtgactacaagggagtcattgacttcagagaccaagtcttttaccaaatgaggggcaggacaccatgagaagggtcttgaatctctagacttccttgtttatagagtataagataaagggatcacttcatttgagaggaacaatctagcaagtcacctgtggtcctttctgacctgctccacatccaggtttcaacattggttttaaggatttggcgcaggaatatttcatagaagagaaaatctctttgtatctcacaacgacttttaacatcagacataaaacacaaaataaagccttcagtccatcagcagaatctaaagagttgcaaagcagactacagagcatcccctcaatggcattcatgtttcaaggtgcaggtgggaagtgctaagcattttcctctttcagaggtggaagcacactcatatctaaatgggtagctccatcgtgaacgtagcaaacagggagtttgtggcagaagaaattgcttgactaaggtttcattcagctgcttgaggctaacatatgctctttgaaaacatatttgtgttagttccttgagaagttgatgtaatgtgttttgatcatttctatctgccttacttctccctgaacttgtcctagatctaatgtcacctctcctacccctcccaacttcttatttttcttttttcttttcttttttttaaaaaaataacctactgtgtgtttgtgttgtgctgctcatgtagtcatgggtgtgggactatccactggagggtgatgaacctagcagaagttataaccttcaagaaaacagactgactctccctgagaggagtatttcctcagttaggggtggagtcctagtgtatgctcctactgaatagtcaagtagggctacattctacttgaaggaaaagagaatctacattctctcctctgggctctctctccctctttatttgatctagagtttatcacacttctctgggtctttcttctgaaatttgctggaccgtcttccttgtctgggagaccaaagctcatctgggaagcagaatttccctttgggtctttaactcagtcttttgagaaactctttctaccactgtgtgtagccgtatataattactcacagtttcctggaatggcattctggatttcttgctaggataatatcttttttttttttggtctgtgtggaaaagcttatatacacataccaacagcattactaaacatatttttagtccataacagtttttgttgacacttttgatggtgtcttcagcaatacttctttgagaaagtcaacccatatttagggagaacctactatgttctgggatccatgttcgttctgagtatgttactgcaacaaaggactgttcaatctagtagaaagacctatgattctgtctacatgtatttattaaaatggagcattttacatgttcagactcaaatactacatccattagatgctagcagttttcttttgttggagcaggcagttacattagacacgatgccactgcagctggttatttggtgctttctcttcctgtattagatgtaactcgtcattctgtttgcgggttagtaaaatctagcatgttatgctaaccaataatactagggtgatcagatacactgttaatttagcatgttttagaactcccaagttaatgggtgttgcagtttatgtttacacagatcagagggttaaagcacaagtcgacaaaacccattatttactagaactcacacaactctaaaaaccagagaaaatatttgactacttacaggatctcattgcattgtgtaaatgatgctgacaagtgctccgtggaagcttgtgaatgttgccgacacaggatggttaaagtctgccatctaaagaggaagctattgctaaatttctgcaacacaggaactcatggcaccagcctgcctctctatcagctccggtgttcctggggggttgaaggtatgaaccaagcaggagggctggattttagagggcaagagtgacgatcctctctattcatgactttcaggcttcacggaggatgctggatgatgaaatgacagtcagcctttccctgcccagcgagtccagcatgttcaataacaaccgctcctcatcaccaagtgaacaggagtccaactctacttatgatcgaatcttcccccttcgccctgactaccaggagccatccagactgatccgaaagcttccagagtttgctccaggagaggaggagtcaggtgaagatgaaatcatgggtgaattgagggagaagaagccttggtttatatgatgtaggcataactcttgctacacgttaaccaaatccactaagtctgggccagcctctggagaagtgtacagtctgtctgtctgcttgctgctgcttctagtctattctgacactcttccttttattcttaacacaagatgttcagagggaccccccccccacacacacacacaaagatgtcaaagtgtcactgaggtgttatcagaagaagctgagcagtctcatccagataaccttcttgtcctgtgtctaatgggagagaaggcccattctgtgctcacttgagaccagactagactggaaattacaatgggaggagaaaagagacatgaagccaaaggcattctatatctctggatagctctctagataattgaatggcttaatttgttgacttctctttgataaatactcattacactaatataaggttttgtttttatagtaaatgtgttttggcttttctcaacaaaagtattgaataaggtgcataatgcaaattgcttcaaagcccagtcccccttggaaagtactacagggtgacatcagaagtggtactgggtcactgatggtacccttagaagctgtccatggtcatcagcctagaagtgacaggactagtagtagaggacttgtattcaggagaggaaggcctaagccagatggtgtgacttaatagaaaaaaaatcagctcattagagaagaaacatgctgagagaagaaagggaattaacccaccaaattcatctaattcctagaaacagcaagaccgaagactacatgtgagggggatggagagatggctcagtggttaagagcaccaactgcttttccaaaggtcctgagttcaaatctcagcaaccacatggtggctcacaaccacctgtaatgagatctgatgccctcttctggtgcatctgaagtcagctacagtataattacatataataaacaaatacataaaaattaaaaaaaaagagccgggcgtggtggcgcacgcctttaatcccagcactcgggaggcagaggcagacagatttctgagttcgaggccagcctggtctacaaagtgagctccaggacagccagggctgtacagagaaaccctgtctcgaaaataaataaataaataaataaataaataaataaacatttaaaaaagagaattgaaaatcaaaagaagaaagaaagaaagaaagaaagaaagaaagaaagaaagaaagaaaagactacatatgaacttattttcttaacagaaccaaagaaattaacctatttcctaaggtctacatctcccataccaatcatattccaactttttacaattatggtacatgttaaacatgattttataaattcaatatgaagttattttcttccctaaactggactgttaagttaatggcagcattccaaaaattaaggaaatctgctattaaaccttccaccttcaagaataccatcctgatatggcagcttaagcattcctaaggcttagccccccgaagtccacagattcgtcagggaacttgttcctgatggtgccttgtaggaaacgtgaaaaacaaaatggcagcctaccttcttaagtccaaagggaaggaaggtgcctagagggagcacaactgcccacaaataagtattgtatgcagaggactagactgccgtggggctggttctcactatcccctcaggtctccctatagccctgggaaaccagactcagggcccatgtcttctcagggtgcagtggtgttgtgaagccggcccagcccaatggacctgagggcgtgccccactatgcagaagccgacatagtgaatctccagggagtgacaggtggcaacacctactgtgtgcctgctgtaaccatggatctgctatcggggaaagatgtggctgtggaagagttccccaggaaactgttggccttcaaggagaagctgggagaaggccagtttggggaggtgagttaatctttggaacgaggcccccagtaggtcctgacatgaaggaagtgggcggataaaagggatcagcagaacaagtgtctctctagaagtgaggtctcagccaaagggctcccttacttgtttatctgcattgctattgagatagttaatggtcaatctcatctttgcttaagagctgtggattccctaggacttttggtttttatacaaaaattttaagggaagcgagtcacaagagccccgctatcctgaaaaatacccaatgctttcaaaaactgtttaccataggtttctgagggtgggacttatggatatcatcatctttggtggattatctaggaacaccctttttgcttagctacaatctttttttccctcatattgagggttatatgtcaaaatggtaaaaacaaaacaagacaaaaaaccaacctcgcccttgttttggtcttggaatgaaaaccaccaaggaatgaaatcaccacaaagataaggaggagccctcttctgggttgttctcagagtgattcgtgggatattagacctttttctcttacataagccatcagaaccttcagagaattcagagcagtgctctcagctgtaactggaatccttgaatcctgtcatctaaatgttacatcatcaaatgtaacacacgatttccgtgaatatgtggttgacttccagtatgaatcaagtattctttctctaggaggtttggtgttcgagaagacagagggaccctcgacatttgtctgtattgtcacgtggactcattctgtcccttgggttgaaattctatgttcactatactattgctaacacctaggcaaactttacaacattctcttcaccctaggggattatattaagaaattgccttatgttttatatgatcaagggattaactttctcaaatcaaagttgaagcaattatgtcaaatgctattttctagtgaagttatgctgtgataaaatgctacattgtagtcattccttcccatatcaatattccattcaatgtacatttcttttgtaaggcactgatgtatcatattagctggatacttcaatgttgtttattaattttgacaattacttggttcaatgatatgtcagccataccctcttattggtctctgattattttgcctgggtcataagagtcagtttttctccggagcatgcccagcaagaatactgaggcatctccaggagacaggatgatgctgagactggatgacttttgtctaggttcatctctgtgaagtggagggaatggaaaaattcaaaggcaaagattttgcactagatgtcagtgccaaccagcctgtcctggtggccgtgaaaatgctccgagcagatgccaacaagaatgccaggtctgtggtctgcattttgaattttcctttacttgcttcctggttaggattgggaatattctggaacatttctgagcttttatttttctttcctctctcgagatgggaaggtttcatgagtggtcacacaagcccacttttaggttttatacttcttatgtggccagaagtgcccaccttttcctctgtctctttcaaacacaaatgtacatatttatattatatttactatatacttacttaaatcccctcacccagtccacataacagcccaaatatattcatccctcatgaaatccagatataatcttgaatgtcaccctctcctctggctggcttttcctaatggcaaacaccttcctccctacatctgtgaattctccactctcccacatctctgttctcattctcaccctgtgttttctcttttatgctccttttcttctatgttcagcagcccctcacaaaagagaagctacttctacttggaaacacatccgtggacctctgagcaaaagaatccacagtcctttgacaggtttccaaactggctagtagtctcttggatcctttcctacacacactgcagtttgcagaacactgcattgttctctgacagcctttccattacagtcatggtgagttaatcctcacccagagacgcatgctggtggaaaactatttgtgtctcagagaaacctgaacatctggataccacatgcctcttcccatgtgtgttgtcttgatatgtcttgctgatactcaccctaagaggaagtttattatccctacttccctaaattattgtaaattccagagatgatgataggtttcattgaaagtcttacagtgggcaggatgtggactgaagaggagacgaaggtgaggaaatggaactgtgtgggctttcacattttaaccaaaagctttatcttatgaatattaacatgatatgggatattcttcatattaatcttcttcataggacaggagagagtagcaagtgggggaaaacattgtgtgagataagaccatgtatctctgggttgtttgggttggtgatatttgcagatctatctactctctcttgtttggtagtgatggatcgcctaagttctggatcttcacacatcgccaaaatccatagtctgggatttcacaggaaaaggagaagggagatgctaaatcagaactacattggttccaataatttataccaacagagtttgactctcagcgcagaattcctgtaaaactcactggagacttctgatttgctcctgtagttttgggaatgtgggctattggctccatgttgacaatttacaactcaaatgtggctttcactatgaactcaagtcattaccagtttggcctaaatggctttgaaacaactccattcgaacaggctactaaatcactgtgtgttgtagctgacttctggtccagatagtattgggaaaagctagtaggtgccaaaacaaacaaacaaacaaacaaacaaacaaacaaacaaaacccagataatcaagagggtgattatccactttgtaaaaactgtcttcactttattaagattgtgatttagtagcttttgaaagagacaaatatcttacagcacttgagttggttttaatgagaagctccatttgcagggaaattttaagcaacacatatcagtaatattaacaacattttatatcgtgatataaaagtgcatcacagatcttatctttgaaaacattatcgttgactcaataaagatccattgtgttcatggagaaggtgaatgggatagttctgggtgcctgtctgtctgttatctcagagatgatccagaggggagccaggcatggtgtgatgggtaggaatgggcattgctgtgcatccatccttgctcggttctgtctctgacaacctctgactttatgtacaatcacaccctccaaaggaatgattttcttaaggagatcaagatcatgtctcggctcaaggacccaaacatcatccgtctcttagctgtgtgcatcactgaggacccactctgcatgatcacggaatacatggaaaatggagatcttaatcagtttctttctcgccacgagcctctgagttcctgttctagtgatgccacagtcaggtaaacgagtcaggtcttggtcttttctgtgcagtcatgagagtaactccagggcctgaaaatggggagtggtaaaacttaaggtatcagttgtcatgggagtagtgtggggaatcagtcagtgtgcagtgatgatggggcagctaccctttgtgggaaatcaaacattctatgagaatggaggcagaatatagatggttcaaccctggtttgatgattagcgtatgccctgtccatagctgctttcttttttcttacacgtgcccctagttatgccaacctgaagtttatggcaacccagattgcctctggtatgaagtacctttcgtctctcaactttgtccaccgagatctggccacacgaaactgcttagtgggcaagaattacaccatcaagatagctgattttggcatgagcagaaacctgtacagtggtgattactaccggatccagggccgggcggtgctccccattcgctggatgtcctgggaaagcatcttgctggtgagtttctccatctgtgagccctgtcgcaccaaccaacctgctgctcagggtgaaggtggaacaaactggaggcagcaggaggcaagccccacagaccttgacattttcccctgactagagaggatcttctcaggcactatattattattgttgttttgttgttattgttattattacagactttcctatatctgctggaaaaggggaatgcaccattatagaaactttagggaaaaggtttaaaagaataagaaatttgctatctttttgtctctacccttctccctattggatggttttagttctgggcattaaaacccttatctgttaaaaaaattatgttgtaatataaattttccattttaagggtatgaccatgcttctcattaattatttagaacagtctgtgtattatttagtgacttttaccatttacttgttgaatccataatttttcttttttatgatttttacctaattcttggtgttttgttccacaaatgaatgacttcagatgtctctcttggagctcagtcgttctggccatgtatatctgaggcacttcaatgttggttttacagacactcagctcattgaaggaatgagtattcactttctacaatgctaccttgattgtcttccataatattcagagaaaagtcagagcccagtttgactttgttcatttctacttcatctgcttttttctggctgatattcatataatatggattcataaattagttttgaaataaaaaaaaatgaacattcttgtctcctcaataagttaatgctttggaatgttgcctttgagggtttttttgtgcatgtatttctaatatgtaatgtctttaattttgtatttttaaatattcaattgtatgtgtacgtgtgtgtttgtggtgggtcagaatgtgtgtaaggacaggtggttgcagaggccagaagagggagtcagatcccatggagatgggattacaggccgttacagggtctggaaactgactcaggtcctctggaagaagaatgaatacttatgtctgcctgttattccaattcacggggggggggggatgcactagaataattgctgttagttagacataagcatgggctagatagcaagatcctacaggggaacgccagggccaaaaaatgggaatgggtgggtaggggagtggcggggggggggagggtgtgggggacttttgggatagcgttggaaatgtaattgaggaaaatacgtaaaaaaaaaaaagaaatgatgctataaacaagaagaatgatgctataatatctgccattttataaaaacccaatggcattttcatcgatatatgtgagcctttatctttatcaacttctaacatatgaaatcactttaaaaaaaaaatctgaaggtgctgtgtggttttaaaaagagacacattgagttacattcagaggactgggtttcctagtccagttgttgcatcattaatggacttattaactggaataatttgctggatcactccttttatttttctgatctaaaaatcaataccctctacatgtctctgccactatctttattaaatagaaaaatgtgtatttaatgagtgctgatcacaaccattctcagtgttgtcatttgataaagtcgtcctcaagtctgtggctaccagcaaatagggaatcgagagtcctggatccaccaggactaattccaggcccttataaggcttccttcattcctaccatcaaaatcgttcatttcttatgctaacttgagctttcccctgggtagttttcccaaagtggtccatagcctataggtgacctagcattcagagagctgatagcccagaggtacctgttctgatgctcagtccatggccttacggactatatccttgcagctcttggatttcatgtccaagagaagcaggactaagctgaggtcacagggatggcagagtagacagctttccagtaagttcacatggccacttctagtttctctttgcacatcagtttcagcattgctcacccttgtcaggggaaggaagattggtttcagatgatggtcatggaacatcttctttgtgggcttggcttgctctgactttcttttctccagcctggtctacaaagtgagttccaggacagccagagctacacagagaaaccctgcctcaacaaacaaacaaacaaacaaaacccccaaaataaaaacaaaaaaaaacttttctctccttcaatagggcaaattcaccacggcaagtgatgtgtgggcctttggggtgactctgtgggagaccttcaccttttgccaggagcagccctattcccagctgtcggatgagcaggttatcgagaacactggagagttcttccgagaccaagggaggcaggtatggactgttgcagacgtggacttgggtgctctcaagggaaggagaaaggaaggtcctgactatgtaggaagaccccagctcaaggatggaaacaaaattcaccttcttatattcagtcaattcatagatctagattatccagaaagtcttcttggtggggggaggggggagggaagggtgagggaagtcaatggtgttgtgttttttgtttttgtttttttttttaagaaaaaaaaaaaaaccttcaaataagttatggtgttggtttaggttggtttaggtttctagacttgaacatccacaaatggactggtataccctggtccttctctggggaggtacctttgggcctactgattgatcctctggggacttatggagagccgagccctcaagctcacatggagtcctaattccctgagatactaagctttctttggttggccaagtttttaatgctccagtgagacctaggatttaaagcttgctagtgactagagcattgcagtcccccaaggggtctgtctgtagcgcatctgacatcacagcatttccaagaggcagatagatggtaatagctagggaaaggttttgtaggagataaaaagtgggtcctctctggattacctaggcttaaacaaggaaatgacaaggacagacaagaataatacatggtgcatgctgaaaatgagaacagcctgcaatttaatttttatctcaatgtcctttagataatttggcagcaggaattctaaatcatgcatcctggctaggagatgtcccagttaacgtttctattgctatgatgaaacaccatgagcaaaagcaagttaaggagaagaggtttatttggctgacacttctacattggtgcagaggtcatggagagatgctgctcctcatagcttgctcaacctgctttcttatagaatccaggaccacatgccaagggatggctttgtccacagtagactgggccctccctaatcaatcactaatcaagaaaatgccctataggcttgccgacagccagatcttattgttgaggccggccagaggctcacatgttggcaaacacactttataaagaggggaggcccattcccagccaggcaaagttcctttgaagtagacagatcagccttttagtgggaacttgtgaagatcacagttctgtgctaactcttggagaactggttcagcctcaggcaggttagggctcaggcaggtagtggcacatcaaaggagaatgctgagaagcagcacagcaggtggctccgcctaagtggcagatggtttgaggccagcctagctagcctggaaggaggtaacatcttatggagatattttcttaattaatgttccctcagatttcataactgaggttctctcagatgtccttagcttttgtcaggttgacctaaagctatctagcataggaggtaacatctctcttattgtgataaagcaaagatttgctcttgtctttatgaaatatacaatgttccaagaagaaagccttcctttcctagattaatgtatttaaacaaccctttagaagacaaattccaaattaaaagttgtgtgttcaattagaacatggattcccactcattaaaataataatcttaatttgagtatatcctagattcataggcaaatgtgggtttattgagagcctcttggtattcttcaaattattgtttatcaacagaaatcctgcagagtcagtttttatgtaaactggaccaacatccatgccataggaggaaggccaagtcctttcctgggttctgtttgttttatgttagtcttcatgatattaaaaatgatcactagacagtcatatgttatttcaattctgttatacagctgcacaagaacacatctttttaaccaactgaaaatcatagacattttcattcataataatctttagaactttactttctcatttagtttgagtctatgtgaaaaggaccactaatttttacctacacagatactagcaatgtactacatacagatttgaccatctccctgtgatcaagtactagaatcagggatttgactgaatccaggcccaaagcaaacatgaccatcacatactaagtcacttctcagttacaactcaaaattttggtaaagaaatttctaaatttagcatatcacatgtaaacaacaggttaaatacaattgatcagatttggtaaaatttgattactattgtgtttatagctgaagttccagtattcatgttctagagtttgacatgagcatatatggacagcactgtgtgtatcagctactatgtggcttctatagtccctgagctacacagaggcggtgcactcatttcccaatagttcatccaacctactgggcacgggagatacaagcaagtagatgaaccatgtgacttatgcaaattctagaagaaacttcatagcttaagcaaatttaaaattaagcaaattttaaacaatttatcttcaatttaaaatgcttaaatgtctacagcaaaaattccaaccattaaaaattaatttggcattttttgtgttcaatttacaatctcaaggtgtgaagaagttccaggtagcatttttcttgaatgcccacagtatgaatagaacttagtacctaaaattaaatcagtttaaattgtacttcagtgttataagaggtaacaacatggtatatgtgatatgaaatcatatgaaatgtaacttaaactgttcaagttaaattgttattgctgttgttgcttttgagaccaagtcttgctacatttccagggtggctttgaactctgatcctcctgcctgagcctcccaagtactaaggctacaggcctgccacaaccacacctggaactcaacattactatacctttttttctaaagttctcagaaagagctcagcaatttttttgttttatcagtaatacctgagaatgccggttatcaataatgcttactttctaatgcctggtattttatatccattgttttataatcctgacttaaactttgttgtatctgatttgatagtccagctaacttgctattttagcagaagccaaatatttttgcttattggcctttttactggcaattagaagtcgatgggcatgtgttattattagactctgggtaaagcccagctcctatgatacatgatccaggatggtgttgtatgaggtaaggcaaggcaatgggaagtagctaatgattaactaggtacaaatatcgggttcagcaaaggtaatgatgcttttatggttgagtgatcatggaaagtttaagtacggtttagtaatctgtcaatatagcagggtattaaaatgtataggtaaggagatgatagtaaaaatatagaatgcgggagatggactggcagttagtaaaatagcatcttgcttgtggaaatggtaactggaaacttcagagtagcatcctaggctggaattatggcatcataattatacctgttaatgcaatccaatctcttctaaatgagaacaatacagagaggggaacatggagaacaatggtgagtattgctaggatacagccttcctcccaatttatacatctggctgaatattattccaataaaattgcaataaaacctcaaattctttagcagaagctacaagtgtgctttatttctgtcatattggctcagacaagattcaccctcattgacggcagatctgagttcttttggcattggtggaacctttagtaggaaggcagggtcctcgtgaaatactgcttgagaggactagaatagaagaaggtaataagaaaggggttgatgagctttgtgtgatgggagaatagacacaacacccgtgtcttttgctaagttcagtaaagtggcgagggtacacatagagctatgttacagtccattctcttcctgccccttaatatatatttttctctcttttaaaatgtttgttcccatagatctatctccctcaaccagccctttgccccgactctgtgtataagctgatgctcagctgctggagaagagaaaccaagcaccggccatccttccaggaaatacacctcctgcttcttcagcaaggagccgagtgatgatgcatcagcacctggcagtgttcctgtggcccagatccttcccacaagacctactgctcacccacatctaagccactccagctggacattcaatggacccgagagacagagaattagtcactctgccctctctgtcccttgcctcctccactacacctccccgctccctactattgactcatatatacttttttacatgaaataactaaaagaagaaaaaaatatagagcagatattagtaaaagaaatgttacttgatataccaaatggttagataatgaagactagaaactcagataatttataaaggttatgcttctgtttataagtgtgcagatcctacaatatttttccgtgtcactttctgtaaaatacctttagaaagaaaaacttgaagaatatgaatgtcttgagaaacatgagattaggcttaaggaaaatacttagaggtaatgaagaattgcaggacttggcattccacaacaaatggatgattttctgatttggacgtgactctcagatctctctgtctctgtctctgtctctgtctctcctctctctctctctctctctctctctctctctctctctctctctctctctctcgtcaaagtgagtggcatgtacttaaaaacctctatcttgtgtcttggaatgaatgttttcttcaatcatggccagagatcagagcctacccatgaaacagggcatatggatagaaagaaatgtctgttgtaaggcttgaagtaggacacagaaagggaaagattgcacaagcttcccggtagaccatggtcataggaaagacggtcctcggaggatgactcgcaagtgtactatttgttgttcatctgtgagggtcttcacctgtgtgttctagtgacaacttgactttactctgtaaagcctcaagttttgatattttaatggttgctccatcagttcctcttgtccagttctatatctttcactatgtgatgcctttgtgggatttatagactagggcttcaacttctcaggcacaagtatccaatgtcatgtccaatatacaagagatatgtttagagtgtttccaaaagtttggccaagacccctggaaaaagttataggaagactgatttccacttttgggaaaatatggaaatagaacatatgcaggtgggggttttcccagagatggggaatctctcatctccgaaaagtttcagatactagctgaagaactctgcagggaagaggttgttgactactgggtatatatgtatgggataataaaaggatgaccatttggtgttactgaaagtgcttttgccaaagagagggtggccagcggcaaagcatgaagttcttttctggctttgggattcacgagaactgatgcatgatcaagcaggagtcaccttagtgactaacttagtgaccctaagttttcatccttcacagactctaagattcagcagcaatctacactacaaaacccttaaatcctatagaggaaaccaagctgaggtaaaatagtggtgatctgcttctgtctatccagtcagcttgctccatggtctcttagaaacctgagagcttcttggttcagccttcagcatggctacaggacacagcagatgtataactctaagtcttgacattaatttcatagatcccattcgctcacagcacatttacctcctctcccatggcttttctaccattctcagcaagactaacttcgatcccagaggtaggagagaacattggattgggaactctggccctgtgctgcctcaagccaagtatgtcattttcccaagtcttgcttctctctgaatttgttttcttatctgtctcaaaggaaaaccgaatctatgatttaggaatctcttggagttttgctttgttttgtgcttgctggagaactagatttgtggttgatgtaggttcagttactgctcagacaattgtggccagtaatagtgatcccgagagacatcatttaagtaagagcaacacctgcattatatctcctttagagtgaccagtgctgcttcacgttatctcatttgatagttctagggccagacatgtttctttcacaactcttgactatatactcttcaggattctgcccccagttcactgtattcctttacaaatgaaatttccaggactttgctttatggaactaatctatcccagatggctatcaaatatgtatcttcatgtacaggcactttgtttttggtatgaagaaggttccaccttctggcactgaaacctttgtattacagacacaggtttagtttctagttacactagtagagtttagcagtacaggtctgagtagccaaccatggtagaaggtaaagacttactctgtagacaggtagctcaaatctaaactagggaaatgaaggtaggttttggaaaagaaagcagaaacagatgagaaactgtgggatcttgttatttccccaagtaactcgtgatcacgatatatgtgaaccatttatgtcaagatgtcctttagactatcatatttcaatttatacctttattgatgaatgcatacattaaccaggtccatttatgtttttattattggggatcatacccagaactcacatttgctaggcatgggtcctgtcattgatctatgttcaaatcttgatctggtgaccagataaatgtgtaaccatgtcacatatgtgacctggagtggaaatgagtgcccagaggagagcatgcattgttggagctgtggaaagattgtctgtgaacgctcaaaactgtaatacaaaagagggctgtatgcaagtatgtgagtagtgttttttttttttaagttgttacatgaatgtgtgtgtgtggctggaaggagaggatgggtagaaaataagaaagaaggcacagtgaaaagaggcaaggagaggttctggggaagatatggggtgaggcaagtcaaacgtggtagagaccgggttggctggaggccatgaagtcaatgctgatgcatgccaagagatctgagagaggttagaaaaagtgacttgggaagaatggagggtaggtaaaggagaaatgctgggtgaaggagactgtctttagtaaatcgatgtcaggtacaccgtaggcaatgcaagggatttttgtagagttgaggaaggacatggtcttcatggctatagaaacacgtggccaccagaaccattagggagtcacctattcatctcaggaagtgagtacagaacgcatttcactctcctgtgggttctagaccacatgtagggctggtgacaatgctgtctgcgcactggcctttggtgttccatgtgctgttggggcatgaaggtgtatgagcgtttggtagttaccaaatacactttcaataatgctcatccttccatggtctaaaatggccacagcaaacatggaaacaataggtgtaagttagacaatactaagtttcatctgatctttgacagaggggtgtgccatattggaaacatgttttccacacaggcaccccacaagaacagtgtgatgtgggcgtagaccatgtgttttaagtaaagaggaaatcagggggcgtgtcaggatgaagggaatgtgggaagatgttccgaagacatgcactagaaaacagaacggtgtctgttttcgtccagtactaaatgaaaagaattgcaatacattgcttattgcaatttttatcctaagttgaatccatgagcctggtgcttgcagcatagtttttttgttttgttttgaagcctatgtccttgggcactgtgtggggcaaggccctgatgttttggcaacatgcagattctggtctcctggaaaccttcatattctttcatattctagaaacagatgaatgtcattggcacttggtgaattaattagaatcctgagctaagagggaaggaagctgggtagtgacgaaggacttgagtaggctggcaggaaaggactggggagggaccatttagttgtcccgtgtttttcagaaatttctcattttgcaatgatctgagacttgaaagaagttacaaaagaatcagcaccttaccttggttctgttttccacacactgaaaatatttcagtctattttcatctatttggaccattttcaaaactaaaccctaggcccggcttggctttcaccagttttcctacattgtattcagttgctcactggatacttttagcctttgttggtttgtaatctggctttggtggcatacaggataaaggattctacctagatattactctacaaatgagagaaaacatcaaactgacaagctcttttatcagggaccagtactccagctgtttgctgaacccactttcgattacagctcatcattgctggacccagaacggccacagcgttacacgggagtcatatgtaatgatcagctctgctgtttggccacccaaacaatccaaggacaacttaagaaaagtaacaatataaaaggcttcaaagtggaagggaattgtaaacagaagaacgggacttttgttggtgaccagaggggtctatgataaagcggtactttggtcaagaattaagtggtactgaatggaggtagggatagtttgtggctagactatggcacaaatataaacccctaatgtgaggttaaaacactgtctttggaggaccagaggagcttcattcgcctaactgttcatccttaattgtaatatcagctgctaagctaaatgcaaacacatcagctccctggggaaaagttgaaactctcgtttcttggaccattactttgggtttcctgctagacatttttaagctgccttgcttaagggctacaggataacaactgtctgtggcttatgagattcctagcacacaaatgagtagtttgtgtatgttatatttttaatgaataaagagtggaaaaattatgtatcacatgtgttaatttggggagaagcgctttataacagagggcttactctcaaagagaacaaaggaaaacgtgttctacagacagtgtatacctttgacctctgaaaaaagctatatagtttctcctacagacaccttgccagtaaccttacaggtcttataggagagcagatccaagttgccaggctgatctgcaagcacaaacatttgtcaagggaaagcacaggtcgttactttcagtacaaaatggttctttgctatggatggattctcttcttcttgccccatgtcctgttcccaaggaccgacttcctgcagcactgtggtggactcttctatgaggagacaacatctgggccttattcaatagcctgtggtgggtaatgtgttttgtcaagagctaaacagcaaatggatttaatttctgcttaacatggtcatagtcattctgaaatggctacagaaatattctctgtactagaaaaaggaatggaacgtggtgccaattgtctattttcctttatttattccctgtaagtctgtcagatgataaattgtacataacagtgattaaagagtcatgctactgatacagtcttctttctgtctcagcagtaacagttctggcctttgttgtctttcctcctgacaccactggtggagtggtgatgtgacacagggaaagtgtgcacacggttatcagggatgtctgacagagagtcatgtgaaaaggcttctgttagatgtcagttgacagctaactaacatggcgatgtctctgacatagtagagaccttgtttcatatcttcatgttattgggccacttctgggaacctgagtttccagaattcttttgaaagccttcattgtcattactgtggagttgttttgttttgatatattttttttgaaggaacagaaacacttgctaaatccaaatatggtctgtctcaggcagctgttcacacaagcataaattaacaaaaactgtatacaactgggatccagatgcaaacttcccaatggagattagggaggaactatccccaacacattttactttcacttgcagaattctgagtaacaggagcacacttctcccagcaggtgtcctagtagaaaagagaatgggcatgaattctcaaagaataaacagtattcacgagtgcacttcctatctctgcaatgtccaggctttcaggaccgaagaccaggaatatacctgagcggtggaactggggtggaacaaaaagaaacaaggggactggggatgttcagagatctaattctgctgccaacacatactgccgaggcttaatggcagatatgagtgatggcttgcatctatgcacacacatacacaaacaacacagacaagttatccacatgtttcattatgtaggtcattattgaggatggaaattttgtctattcaatttttcattagcaacttgcatgggtctggttaagttgcagagaacaagaaaactattttgcgtttttttttttagggaagagcgttgaaaaatatgaacatgagaaactacacagccccaactggaagttattcattagtcctgtttgcaaattagaggccgtctattctgtgaatgtttctaagaaccaagaatagaactttgtactcagagcaaaagatatgtctctcatccttacctactgtcccctaaaaggaaaagcgatcacggtctgactttagggtagagatggatttattacaaggagcacaattaatgttgagttaactacacctgctcaactcatgccaaggcttgccagtgatagcttcactcactgtgcaccagactgttctggtacccaactgaagaaccccaggacaacacaaacccaagatgagtagtttggagtgaggtaaaaacaaaacaaaaccaaaccaaaacccaacactcacctatgaattaaaaaatattttcattgctcggggttgtgactctctatgacaaatgactttaaaaattaaacattttagattaatagtccagtccatcccttgtcggtcacagagccttggaagcagcaacttgagtagaacaaaaggaggaagagtcccagtttcccttactgggctgggctggaagtgatagaggactttctctgaagtcttctgggtttcatttaactcagagctggtcccacacctgttctcatctgaggctgtagtaaggctgaactcctctcggacccaggcagactcctgatgttgctttcatgcacagagttcatgctaataattgcacaagagaacttaaaaaaaaaaaaaacaactcaaaataaacgtcataatatgttaattaagtttacagttttctggtgggccattttcatgctaccctagggtgcagtgtggacacacctgtctgccacccaccccacccaccaggctctccaatttctttttaaaaagtgagctttgggagagccacacagttttctctgttcttttgctgccacttctgaactccagggtttaaaaaggatcatttgggtatggaatctcaagatctgggattttttttttcacttcaaggctttagaaaatttgttaagttactgtcttttaagaacagttgaaatgatcaaccagttttcttaagttttagcagtttgttggtatcattaatcaaaacatatagattaaagcccagaaaagacgttatcatttaggatcacggctatccctagtaattacagctttgaaagaggcataaagtttgttcaatcatatgagtattagtcctttcactcaatattaatcatctataagtagcgaaagctgggataacgattataacagctgcgcagggtatttttatgcgaattgaacttaattaaaaaaaagggggggagttttaatgtatgcatttgcccctccctgattacctagttctgctccctccaaagtactcatctgggatggcttggcaacaaaaaaaaaaaaaaaaaaaaaaagcgagagaacgagcgagcgagcaagcgcgcgcgcgcgcgagagaggcagagagagagagagaaaataaagctcattacagcgacctgagaggtctgaaggagatgacagtacgcattcctttagccttctgagattctctggtttcattccacattcagagcttgaaattgctaactgactcgtgattcgacataaatacaattcaatgaaatccaggttctctttcttaaagaccatgctttacacgtcctaagaagcaaacttggacttgggttcctgcaccgaagcctctcccagcagccttgtgaaacctccagctctgccgcccgcttgcttcactcagaacaaagcccccgccgcagactgggggcggcgactgcctggattggctataggacccttgtgtcacgtggctccgcccctcggcctatctcacctcacccggcctgggcgtggagagaagatgccgagtcgcgattggcgggcctaacgcgcggaccggatgacgcaggagaggtggagccgggccgagccttgattggtcgaggtgcgcgtggtcacggatcaaggttcaggctaagagcaccccggtgcagttctacttcggtgcagggcgtggaagatgcggaaggtggttttgatcaccggggcgagcaggtgagacctcctatggaaccccggagtctatgcggggggaagcgcaggtcggtgattcacttcgatggggtccgcagagaccccgttccctggctttccaagaggtgtggtcatgcctgcctcgcttggtgctcggtgcttggtggctggcgctttgaattaaacatgacagtggaaaggaaagctaaaccgccagtgactggtcagcctggcagtgatgctgaacagttgttctctagggaccgtcagtctccgagagtagttaattgtaggtgcccacagttcactttaaacctaaacactcggggtgtttaaatgtcagcatccatgaactttaggacaatgaggaaatttcactcctgcagcatgttttcatatactctttccaggaacctacagaacgaccagtctagcaactaaggcttatcctgatgcagatgccagcaaagttattccaggcttgcccatttgacccttgacctacttatcatttgttgatgaagaatgtgtggaggatggacccaaccaactcccctcctacccccaattggttacattgctattttttgaggaattaatacaggatttgttaaatgccacttaagcctgtttcagtgacccaatcacatctatattaactaaaccagtggaggggtctgtcttgggctttttgttagtgtgcgctctcctttaggtcagctgggttttggccgttctcgagtggaaagtgcctgtagaagtcagacctgaattggtgtgattttgatatactgtggtgtgtgcaacttatactaaagttggtatttaaagtaaggatgaataggccggtatctgcttggtactttgctggcagggccgccagattctgtggattccagactcactttggagctccctttgctggcagtctgcatgagaacttactgttacccagaatggcctcgctaccagcagtgggccccatctgctgcgaccttcatatcactctttgtgacccagtgcatctgaagcctcctagctctgctctttcctgcttctttgtcttcggctctatctgcttgctgattctgctttctgtctacttgtattgagggctttttttttttttaaactcttggctattctgctgtgacttagtagttgacagggatttaacttcaagctgtgctactgtgtattctcctgaaaacaaaacaaaacaaagcaaaaaaaaaaccccaaaaaacaaaaacccaaaccaaaacctcaccggttggttcacttactgcgatttacagttttcctaatagcaacagtaccaagaagtggtgagaacccttgcctttgcgggaccaaggcaccacaagaaaatggggacacggtaaacaactaatacggccccccttaaagtatttgctagagatatattaaatcacaccctaacaggtgctccaaccctcactcactgtgtcattgaaccatattagaggggaacaactggatgttgcttatcaacatggctaatcgggagattccttcttcacataatgtttgggtattttctatctgcttggatttctcattggagctcatattgacactgtcaagtttctgaaccagagagaactgccttcatttaacacca

SEQ ID NO: 1293 - DNA, 3255 bp, Mus musculus
tctaagtggacttctcttggtgtgtcaggaaaagttcggaaaagcggcagagggcagagtttgaatcagggcggaagggcagggagctgggctcttcaagactcaggaccgaggcagatctcatgttttggggtctggatttgtgtcagcgagggaagaacaggcgccaataaccaaagaaggctgaagcgaggtacaggactccatagcagctgcaagtacaataaacagttttagcagagctggaaatgttggcaggcaagacaggccgatcgcagagtcgggctgctggagagagggaaatctacaagcaacctgacatttggtgctcgtgctctagagcattctaaggctcgctgcttgacttctaaagaagctgaaataattgaggaggagcggggaccctctgtttccaaggactctgttctgcagagaatgttctgcaccctctgatactccagatccaactccgtcttctgaaatgatcccgattcccagaatgcccctggtgctgctcctgctcttgctcatcctgggttctgcaaaagctcaggttaatccagccatatgccgctatcctctgggcatgtcaggaggccacattccagatgaggacatcacagcctcaagtcagtggtcagaatccacggctgccaaatatgggaggctggactctgaagaaggagatggagcctggtgtcctgagattccagtgcaacccgatgacctgaaggaatttctgcagattgacttgcgaaccctacactttatcactcttgtggggacccaggggcgccatgcagggggtcatggcattgaatttgcacccatgtacaagatcaactacagtcgggatggcagtcgctggatctcctggcgtaaccggcatgggaagcaggtgcttgatggaaacagtaacccttatgatgtattcctgaaggacttggagccacccatcgtcgccagatttgttcgccttatcccagtcactgaccactccatgaacgtgtgcatgagggttgagctttatggttgtgtctggctagatggcttggtatcctacaatgctccagctggacagcagtttgtactccctggaggctccatcatttatctgaatgattctgtctatgatggagctgttgggtacagcatgactgaagggctaggccagttgactgatggagtatccggcctggatgattttacccagacccatgaataccacgtgtggcctggctatgactacgtgggatggcggaacgaaagtgctaccaacggtttcattgagatcatgtttgaatttgaccgaatcaggaattttactaccatgaaggtccactgcaacaacatgtttgctaaaggtgtgaagatttttaaggaggtccagtgctactttcgctcggaagccagcgagtgggaacccactgctgtctactttcccctggtcctggacgatgtgaaccccagtgcccggtttgtcacggtgcccctccaccaccgaatggccagtgccatcaagtgccaataccattttgccgacacgtggatgatgttcagcgagatcactttccaatcagatgctgcaatgtataacaactctggagcccttcccacctctcctatggcacccaccacctatgatcccatgcttaaagttgatgatagcaacactcggatcctgattggttgcttggtggccatcatcttcatcctgctggctatcatcgtcatcatcctgtggaggcagttctggcagaagatgctagaaaaggcttcacggaggatgctggatgatgaaatgacagtcagcctttccctgcccagcgagtccagcatgttcaataacaaccgctcctcatcaccaagtgaacaggagtccaactctacttatgatcgaatcttcccccttcgccctgactaccaggagccatccagactgatccgaaagcttccagagtttgctccaggagaggaggagtcagggtgcagtggtgttgtgaagccggcccagcccaatggacctgagggcgtgccccactatgcagaagccgacatagtgaatctccagggagtgacaggtggcaacacctactgtgtgcctgctgtaaccatggatctgctatcggggaaagatgtggctgtggaagagttccccaggaaactgttggccttcaaggagaagctgggagaaggccagtttggggaggttcatctctgtgaagtggagggaatggaaaaattcaaaggcaaagattttgcactagatgtcagtgccaaccagcctgtcctggtggccgtgaaaatgctccgagcagatgccaacaagaatgccaggaatgattttcttaaggagatcaagatcatgtctcggctcaaggacccaaacatcatccgtctcttagctgtgtgcatcactgaggacccactctgcatgatcacggaatacatggaaaatggagatcttaatcagtttctttctcgccacgagcctctgagttcctgttctagtgatgccacagtcagttatgccaacctgaagtttatggcaacccagattgcctctggtatgaagtacctttcgtctctcaactttgtccaccgagatctggccacacgaaactgcttagtgggcaagaattacaccatcaagatagctgattttggcatgagcagaaacctgtacagtggtgattactaccggatccagggccgggcggtgctccccattcgctggatgtcctgggaaagcatcttgctgggcaaattcaccacggcaagtgatgtgtgggcctttggggtgactctgtgggagaccttcaccttttgccaggagcagccctattcccagctgtcggatgagcaggttatcgagaacactggagagttcttccgagaccaagggaggcagatctatctccctcaaccagccctttgccccgactctgtgtataagctgatgctcagctgctggagaagagaaaccaagcaccggccatccttccaggaaatacacctcctgcttcttcagcaaggagccgagtgatgatgcatcagcacctggcagtgttcctgtggcccagatccttcccacaagacctactgctcacccacatctaagccactccagctggacattcaatggacccgagagacagagaattagtcactctgccctctctgtcccttgcctcctccactacacctccccgctccctactattgactcatatatacttttttacatgaaataac

SEQ ID NO: 1294 - protein, 884 aa, Mus musculus
LRRSGDPLFPRTLFCRECSAPSDTPDPTPSSEMIPIPRMPLVLLLLLLILGSAKAQVNPAICRYPLGMSGGHIPDEDITASSQWSESTAAKYGRLDSEEGDGAWCPEIPVQPDDLKEFLQIDLRTLHFITLVGTQGRHAGGHGIEFAPMYKINYSRDGSRWISWRNRHGKQVLDGNSNPYDVFLKDLEPPIVARFVRLIPVTDHSMNVCMRVELYGCVWLDGLVSYNAPAGQQFVLPGGSIIYLNDSVYDGAVGYSMTEGLGQLTDGVSGLDDFTQTHEYHVWPGYDYVGWRNESATNGFIEIMFEFDRIRNFTTMKVHCNNMFAKGVKIFKEVQCYFRSEASEWEPTAVYFPLVLDDVNPSARFVTVPLHHRMASAIKCQYHFADTWMMFSEITFQSDAAMYNNSGALPTSPMAPTTYDPMLKVDDSNTRILIGCLVAIIFILLAIIVIILWRQFWQKMLEKASRRMLDDEMTVSLSLPSESSMFNNNRSSSPSEQESNSTYDRIFPLRPDYQEPSRLIRKLPEFAPGEEESGCSGVVKPAQPNGPEGVPHYAEADIVNLQGVTGGNTYCVPAVTMDLLSGKDVAVEEFPRKLLAFKEKLGEGQFGEVHLCEVEGMEKFKGKDFALDVSANQPVLVAVKMLRADANKNARNDFLKEIKIMSRLKDPNIIRLLAVCITEDPLCMITEYMENGDLNQFLSRHEPLSSCSSDATVSYANLKFMATQIASGMKYLSSLNFVHRDLATRNCLVGKNYTIKIADFGMSRNKGDYYRIQGRAVLPIRWMSWESILLGKFTTASDVWAFGVTLWETFTFCQEQPYSQLSDEQVIENTGEFFRDQGRQIYLPQPALCPDSVYKLMLSCWRRETKHRPSFQEIHLLLLQQGAE

SEQ ID NO: 1295 - DNA, 169398 bp, Homo sapiens
  misc_feature (1)...(169398): n = A,T,C or G
ccctgagccctctcaggaaagtattaggaccagactggcccttagtttgggttcttccatccctgggagtctcagttactggcataaggttggccctccctgatcactgctggaattttaggccacacgagcaccatgtttctcctccagccatcatgtctcaccctccagtggcagaggtagatcagggtgaatgatgtctggaactctccattcctcaatgtaaaaatcatattctctctacccatggaggaataacttttttggaggacaaggatcaaagctcattgctaccctacccttagtctgggctgggaattttttgaaggatggatgccgtgttgcctgtcaagacccaaagtccctatcccctctacatcctgatgtcccactgtttccatcctgccacttacatgcctccacttcatcctttagcaatttatctttctctactgtgagatttagacacctcctgctgcattagctacagttccttcagcttattggagtaagaactgctgaaagagctgggcacccatggtccactgcatttccccacttggttctttttattcttcctcccacaatggccctgagaactcaacgagcttttgtgttcatatttccccagtcgactcctaaaggtgacttccagggcaggcaagggatattctctctagtctccttctgtcttctttgtttaggacgctgacatttccagccttctcaggtaggttttatctcaggtattcattcattcattccacatttaacaaatattttataaatccctactatatgctaagaacagttgtagacacttggagatatgctagtaaacaatataatagtgcttaccttctagggggtataaataaataaactatatagtttttttttctttgagacaggatcttgctctgttgcctaggctggagtgcagtggtgtgatcatagctcattgcagcctcaaacttctgggctaaagcgaccctcctcccttcacctcctgaatagctaggactataagcatgttcccccatgtggccttttttttttttttttttttgatagagacaaagtctgtgttgcccaggctggtctcaaactcctggcctcaaggtatcctcccacctcagccttccaaagtgttgggattattggcgtgagccaccatgcctggcctgcagtgtgttaataagctctaacatgaaacaaaagatgagaaagggggatagaaaatggtaatggagataaaatactagaaagggacaccagatttcactggtaaggtcctttaggaaggaagggaacaatgtaggtggctacatggggaagagtagcccatgtagagggggcagcaagtgccaaggccctggggttggttgtccgatctgaggaggtgtattggcataatctgattagtaggagcaggttggagctgcctgaatagggctatagtttagaaataccctgtagagaggaagtggtgcctggtatactgtaccaggtacggcaactgaaagaagatttagttggcattgcaaagcctggaatctaaggagagaggacacatataggtggcaatctgtgccagaggtcagtaatgggtggagagaatgtatttaatgagtggatagcaagagtggtgggaatttgcctattgtcggctctaaatattctatgctgtgctctgtgatgtcagatctgaggctctgcaaactgcagtcagagattcctttaccaataggcttcctcttaggttctgtcaagaggaggcagaagatgaagactgaaagtcaggaggaggagagaagagagtaattttctatttcttgatatcaatgtcattgctccagaagtggcactttgccccagcagtggcatttcatatcactgtggcagtttattatggcttccagcttctttccgcattcccagaaccagcctcaacttccttcctcaatggtaccagcaccgttcaatgttatgaaccatctcaaaggtcagagccctagcttcacggtgcccacttcttctagtgcctaagttctgatagccccaaccctcaccttttcatcccccagccttgggatggtaattgctttctgctttatgcagttattaaatttccgctcagtcagctctccaacacctgtgtgatcaatcaattccttattaaatccatgctcttgaaatacctaatatggtgtctactttcctgaccggatcttgactctgtctacttgttgaccaagtacttgcctggatttctgagtaatacctccctgtggattccgtgctctgggctctactcctacatcaaagagttactgggaatgccaacatgcgtctctgagtggtttccttgtctgtcataattggaataacaatacccatcttctattctggtagcagtgttagttaatttactagaaaaggcacctgtacagagacctgaaaagggcatgacttcaaatcacagaagcctgtttgatgcagtttaagcagcaaatgggaacacagtatatggacactagtgtcatatggaatccaagagcaggaagagcatctcgaccttgggaagagcttgcaactgagaactcgaaaactgccaggagtctaacttgcctttgcttttttctgcacattgacttcattcttttttccctgctggccaggtctataggggagggagcagtaccaaggtcactgtagactgagaagacctacaaacacctactctcctgggcctcagtaatgccaatgaaacttggaattggggtccagatgagatgtaggtctttaatcccaaatggactagctgctactgaacagatccccctatctcaggcttagattgattctaaggaggtggggagggatgagactgagtctgcagatgaggatccaggggtctcggttgcaggaagtgagagagatgcagactcaggacccatctctccattcacttctgccagttctctcaagtgtattccagatttctcgtgaaaaagaaaaaaattctacctccaatcttcattctgttgaagaaactggggctccccatgggctaagcaaagaatgaaagatttcagggcttgatctgtgttctcagagattactgacatcccatagggtgatcttgtctagattccatccccctcaaaccactcccctgacccctgattggttttggggtgctttgcctatttattttttctatttgttttattcacctcaaatctcttaaatgtttaaaatgaaaacagtttatgcacctgtgttcttctctgggacatggaggaccttaaagaacacagattccatccataagataaacatctgagccttcccagaaacagacaaggattacagagaatcagaatctggtctttatctcgaaaggcaatttgagtgctgctggacattgcaaactggaattgtacatggaaaaataacattggtgctataaattcctttctgctttgaaatatgttgtgtgttagaaacagagaggtaatgtttatggtgtaactcagaatactgggatagagttatgcattaagagtgggacgataggacattatgcaaacagagtccctaaagagagatgttttagtgggtaaaataatttttaagaattatttagatactccctaccaataagtactcacagatattaacctcccagacttccactgtcctccagagatcgatgggaaaagaggaatgaatcactaaaaataaagctcaataactaaaagagctttatcctccaaacttcttggatcagtacagtcagtggggactatgttgattctctcatggatgctggaaagactccagcctggaagcaaggcagctgagagtctttaagtttcataagaagggttattattaagtataagatgattcctgaaaactgggcctgagcatggaaaagtaacactgcttctccaagttcactctgcttggacacaggggtgcaagaggtgctgggagatggttcagctagccgagggttgtttccacagagtacagacaaggatagggttcaaatggcagtggggagattcaggatacataaagcagaacttttgacactgagtgttgataaacactgaggactgtcgagagatcctgttttctggagatgcttaaaagaaggttgctatcttatctgacagggatggtttagggtgccggactgtagcctggagaagggtttatatccttgatcattatataaaataagtcatttaaaaaactttttgtagcctcactctcttcaaggaagctaaagctgagttacaattctgagatttctgtgtctatttcttcacctctcatcttagaatttctgccgaggcaagtaattgctattctttctctacaatgaaaaagaaaatgaaagaacagcaaagcaggcagggagaccagataacctcgtgctccagaattgagtgtaaattaagagtctagaggctctgaggtttgttattgatgccaaatgggcaggaggagcactgagaatcacaagaactggattcaaactcagattctgttacttaacagcaaaaaacctcaactaagttaccaagtccctgagcttcattttccttcccttgaagtgaggatattaatatctgcactgagtacatattggggctgtctgaggatcagatgaagtcatgtctgtgaaagcactccttgaactgtgaaatattgtatgtggcattgttagaaacagacaaataagaatcttattttggccattaaccttaactttctcttaacttttccgttcatccgtgggagagtcaccagatggactgatttgaattttccttttttgatttctcatctctctctctggtggacgtgctaaggggtaggaacataatcattgatgggcttcaggagggcaaaggatggggaaaaaaaggacatcgatgattttccatatggataacaagacttcaaactctgaaaaactaagaattaactatttcctaactgctctgaaatttttcctgtacactacagaaacacacagcatattattgtcacacagacacacattttgttgtcacacatacacacacgtgttctagctctggcaggtatgatcttgggcaaattaacttctctgtgcattggttttctcatatggccattgggaaaataatagtacccatcccataaaattcttgtgagtgttaaatgaaataataaatgtggaattcttataacagtgtctggtatacagtgtcagaagttttatatgtcaaaagttctgctttatatatcctgaatctcccctcctgctaattgtactcaataaattattctttctggatcttatttgatcttcacaaccctgtgaattttcagttcatattgtcccccattttacaattagaaacgtgaatgacttgttcaaggtgactctgccccctaggggtttgtaattggatcactttccatgaaagtgtccaacaggagaacagcacctagtagtgtgcagggttaggacccagaagataaagtgaacactctcttagagttaaaattatctttgaaagacctttaaatcacttacagtatacatacttctgtggatatgacttcataggataattcttaaggacactaaaattcgagaatcgtggggtaaattcaggaagacactaaaagcaagtctatatgcagctgtctgaacattcagactattttgctttttagaaaactaaggtgtttctattgtctacaagagttcctccacactgatttttaaagactattaagcctttatgccttaatatatgtcaatggatttgtctattatggatagaacaaccaggaacagggagtcttaagaattaggttctaaaattggaggccgggcgcggtggctcatgcttgtaatcctagcactgtgggaggctgaggcgggtggatcacttgaggtcagcggtttgagagcagcctggccagcatggtgaaacaccgtctctactaaaaatacaaaaatttgctgggcgtggtggtgtgcacctgtaatcccagctactcaggaggctgaggcaggagaatctcttgaacctgggaggcagaggttgctgtgagccaagaacgtgccattgcactccagcctgggcgacaagagcgaaactgtctcaaaaataaataaataaataaataaaaataaaagaaaaaagaaaaagaattaggttctaaaattggtgcttaagttaaatgtgtgcagaatataactccaaagtacacaatattctctgcttttgtgttagtaaggcataatttctttaaaatccagggattgccatgcttgtctaattattggtgtaacagacaattttggggtgtcttctaatgtatgacatcccttttctgagaattgattcatgtatgcgtatgagctcttggagccatattcatattatatgatccattgccctctacagtttagagatagaggatgcacataagaaacacatttgaccagtaaaattctccatcccagcattctagaactggactcccataatatctgtcattctctcatgatcgtttgaagcaaggagagataaatttgagaactaaggcactgttacaggcgcctgctataaccagctataatattatgcgaaaataagcagaaaaggctggtttactgaaagagaatgggctaaagcaaaatgagcagcggtaagcagaggagagagacaagaaatgaatgagagagagaagaaataagagaatgagaggagaagaaaagaggagaggaaagaagagaagagaggaggaaaggagaagagaagacaggacaggacaggagagaagaaaaacctgttgactaagttactggtggtggctaatttgtggcttaaattccttgtgaagttaaatgtaccacatgggtttggtttgtgtgaatatccatgtatccttttaaggtatgtgtgtgtttctcaaactaagttaagttaattcattttactttcatccttcattttatgtcctgaggcatcacaaaagcatccagctcatagctatttagagacagaaatattatagttatttcaatgctcaacttttgtatttacttgaaccttggtttgtagactagaaaaggtcttgaaaagtcatcttgcacatcttacttctaattaacactgcatcttgaccattccggatagatctgtcctatttttgtaaaatcccagtaatggaattctatattgtttttcagtcatttgttttcagtgtaaaacagtcctcataacaaaaatacattacttcctatggaacagaaataattctgaatgcagtgactcacatttcccaagccagaccaaccagggggtaaaatctgttcacagaagagtaataaaatggtatttctccacatctgttcctgcaatattaggaattccagtcttactcaaaactctaccaaatagctctgagagttcccaggacatttcttctgtgtgttccatgggttagtcccgtcagctttgaagttagcatttgccattttcttactttccagctctggcttcctacagcagtggctggtgtcaaggctgaacactggttgtcactcaatcagagttgtctctgaaaactgaggcttcaatctaatgaatcctcctcatgctttaaatatccctgaagtattttagtaaaatatcactttcagcttttccttgctcttttctttgtagaaccttcttcctagagttcaagattagaccccagctttggctgagaatagcctgagtgatggagatggtgttttgagtgattgatagacatgctattttcctttgagctactccttactgttgacgtagctcagtttttcttgggacttttatcccttggtcctttctgtgttcagtgagttcttccccagaagtgtcctggtctatatacaaatagactcttgactgcctagtccgcctcagacaaacccaggtgtgtctgggttttgcagtctacatcactggctcagtcctggctcaattaagactacaacttgagttctaattatacatacacagagaaaaaacaatctcacctatggagtagaaccaccttaaaatgaaaaaggaaaacacatacctatatgtacaggccctgtcctttatcaggctcagtctggttttatgaagttgttactgttttccacatttgacctatagtatcaccaaatctgtgaaatcacagattgtatttttggtacattctttatagtaatgccaaagaggtgaactactacaggcatggacatttgaggaggatttctagttgtctctggcaagcacccagtaaagtgcctgataagagcccaacacatatttattgagttgagctgcatgtctggcctgagtcaccctcaggcctgacttcagatgctgtaagttatttgaagagtcttcttaataagttgatctctgcagtgtcttttctcttcataaactaaccctagttctagttttttctctaaggtcttgcttgctgcctttaatcatttccatggctgccctctgaaccattcccatgttctccgtgtccttttctgtaacagctgtgaggcacagatgttaacggctgctttctgaccctcagactggtgctgagcttatgagacttttagggacttaacactgactcaacactagctctcagtttcatggccaccctcattgtgtgtgtgtgtgtgtgtgtgtgtgtgtgtgtgtgtgtgtgcgcttttccattccccttatgaaacatctcctgcccctaacttactatgggaacgttcctccatgatctctttccatcctccctttcctgtttgctcacttcttttcttgctcatcttggagactgtgcaatcccagattaactacaaacagagaagagctggtgatagctccagagctcagagaaaggaggtctctttacaagaagtctggctctcaaaggtaagctcggtcttcttgacctgccttttgccatctacctctctctttggatctcctgcccctgggtccctgcttgccctgcattctccatactcacggagaatcaggacctccagaacagcccagcgtgggcttggtcaggaatgatccaggctctgaagggttaaggctggagcctggatggatggagagggttattagttatcgtttggagagtggagtgaaggctcctcccctgttgcctacccgcccctttcacatgatctctgactatagctgtggaagcggggagaagataaaggagggaaaaaaaagttcacaaaataatttagaaagtccttataaatgcttgtgttttcatttagcagcatgaatccaggacagcaacagaccctcagaggcagcagccaactgggaattgagtggaaaaaaataggaatcctggattctggcagtttccagttgttttcttggtggggggagccgtggtgggaagggattaaatcaaatctttcgggggagagctcagctctaggctttcatggtcaaaatactaaaggtcagctccgcgtgtgtgccccaactgtcctggaagcttcaattggaaaactccaaactttaagttttgcttatagcttcagctcaagtaagaaaaatgaggtgtggggtaggcggcgggggggtggggatcacaggaaggggatcaagtcttagatggaggggaaggaagtggagatggatatgggtgggaataaggcagaagggagcggtgtctttaagtctgtcctatggttatacatattttttcttctatgaatgggttttgctgtaaattatagctttgcccatagtcccttgggtcaaaagaaatagtctccaaacagaaaacagctctgattggtgactttccttcttccctccccaacccccttcctaattgaaaccaaatgtgcaatatattggatgctgggatccctggcgctttcccaggaatcctcagaatgtgaggtttctctcaaaggcatcttgcatcagcctgtggatgtatgcctaccaccgggctccttcaccagcaaagtggaaaaagaagcgtttcacaacaaattcttctttttgggttggggaaacgcagtggattatagctctgttttcttctttccaaaactgtgcacccctggatgaaagtaagttatgtgggtcttttttctttattattttttcttttttgaaaatgaaagctccgcatatacttcttttggtgtttcaggaaaagttttaaaaaggaaacagaagggcgttttaagtcagacaaggaagggaacgtaatgaggcaccacagactcgagaaatcagatcccatgtttttgggggtctggatttatgctatgaagggaagaataaagagcagtaataaccaaagaagcctgaagcaaaataaatgaatctatagcagctgcaagatacaataaacagtgttagcagagttgaaattgttggcaggcaagacaggccgattgcagagttagtttcaggatgaagaaggcagagcaggagagctaagtttttagacatttagtagtggtgttagaaggtcctgagttttggagatagtgtagaccaagcactttttgtttttcaggggagttgctgatttacttgtgagaagggtaactttggatgaggggtggcttccccctgagatttggggtggctagggggaggctgggtgcatggaagatttttcagttgtgacagtgaaatacagcttcccagactcatctcctcgctggctctgggtgcctttccctttgttatggaatgactggggctgttttcatttgggacctctgagtcctggcctaggttcaagagtcccatccaaagggaaagagaactgttcccagtggctgaaactctcagaccagccatttgaggcaagagttcgtactgttcaagccagtagggggttcagcaccattttgccgatcattggcttcctacaacacagagttaagagtcctgaaaagggccttaggcctctcatctaaccccttcgctccacagatgtaaaaaatgataggaaggggaccgacctgttcaagtcccacagcacatctgtagtggagctgaaaatgaaattgagattctctctactgctagtccagtgttctttccactccatacctctgctttcatttcctttttaaggcttattctggctgagacaatagaggcagtatgatgagcaagtcaccacaaggacgttaattatcagtaatagagaggacgccaatggcggctcatcagctaatgatgtctatggttatatttgtgtgtgtgtgtaaaataaaaagaagctaaattctgagtattttctatgcagcaggctcaaaataatacataattcatgctcagagctcttcatacataatttgattgactctcacagctatgtaaggcattatttctatcgtacatgtaaggacattaatgcttagagaagcgaaatgagttgctcaaggaaaggtagctaatacatttgaaactcatgtatatctgactctaaaacctatgcttggaatcactattcaatgatactcccctcatctcccttgcatttggttacttttggggtcaaattccatatttcactggctgatcaggaggtgaaggtgtcaggctatgggagcagtatggattctctctcagaggccacttctgcacttggctgaacatttgtctggatatcagatgtggggttgatttctgggtctttggtatatacttacctttgttatgcaaagagcctgggacttagagtcagaagattcaggataagttctggctctaccttttactacttagcaaagttgctttgcctttctgcaccttgacttctgtatttattatatgggaacaattgcagtacctttcagtgtgattgctgcaagaggtattggacatgcatgcatgctgaaggctatcaagggcttacccatatcagctctttcgattaggatcggtaaacacagaacgtcatatgaggcagcccctgtggtgctgggtctggcagttggtgctgatgctggcaggagggcagatggatttggatgtgtgtgaaactctgaaatgggtggcctcagtcttagtgcccatctcctttgaatggaagcaggccttcctccctcccgggggaatattcctgagggctctgtcttaaattctgtctcttaaattctcctccactggcctggtttgatatgattccttgcccaaagcagtgcaggctgaaggacactgtgcttggtgaagcatcccctgtctctgaaaaggaagtgtttagtcaggaccagtcccctgattgctcctcagacaagactgacatttgaggagcttcgtatctagctgagggcagatccttgacccaggaccttcttgtcactggcaggcacatctcccttcatcctttccctggcattccctattctgtgcctgcagtcagaagggaggctgctgctcctggggtgggggtggagagccagcctgcagtggggaggcctcagcctctgtttctgggtaagatccatttgctttagaaaccttaaatgtaagggaagtgggtaaggtgtttccggaatgcctttcacttagattcctcaacagagtctccatgtccaagcacaggaccttatcacctgcttattctcccctagccactctgtgaactcgcacttttctttccttcttgtataattgctccccagtcttgaagtcatctgaattctctatcacacacagtgaatttacttcaaacctttccatgtatttgcatttttaatagacacatgaaaaaattggagcggccacccccccatacattcatgtcacaccattttcaattcgcatgagctctcagatatccttcccaagctcccttacaagatctgctttcaggcacttcacatcaccctcacctcaaacacacaatccaaacacatgtctcgcaggcatccaaaaagcaaacacacgtctaaaagtggacctccacagacatgctaacattcttgtgccagctcacataaatggtgacctgtccgcaacacagacacactggactctttatacctcttgccctgtttgaagctgtgcaacatatgaattgatcgactctgtcccaacaatgactagtcagtccagaaatgtgtccagcatccccaggcatcccagggcttctctgaatgcagcaaccatccataatgaggactgttcaccaggaaattagaaaccccaggtagaccttaaaagattttcagaccaatcaaatcagaatatctgaggttggagattgggaatcagtactttgaactgctccccaggtgattctgatgtgaaacagaattaagtacctctgctgataaatctccaactgtgttgtctttggcaattcaattttattccatttgatttagttctattcatcaaagatttagtaacactgtgctaataacatagtttagtaaagaagctgagatgtccagatacctgtcaaggatatttattggaacatcaatcacctcgtgtctaaagtgatgatctctgtaaatttttctctcttttaattatatttgtatatgtttaaatgtgctattattaagcctgcattattcatgtacgatttggctaaaaatggttctcttattttctaattgttttgcatagatatatttgatgtttcctaattttataaaccccagcatttggcaaattgtgtacttattagctggaatcttactttggctttgaaatgctgaagaaggtcagttttgagccagcccaagagttgctaaggcctggaagggcaatgcaaaggtagaggaattctaaacatgggtttggactcactacacagctcctgagtttagctgggcttctcctggaaattggatattgtctgtaatggatccactcattaagtcgtctgtggcttgtgatttgtgcctaaaagaaccccacaaaaatctgtgaggggccctttggatctatagctccgaggttagtgctggctggtgctctgtagtgtgagtgagagggagagggcatgtgataaatagaacttcagatgcgtgatgtagtgaaaagaacatgtagtgaggctctagtcccaccaccatcattttctagggtttcgacctcagaggagttttttaacttcattggtcctcaatttccccttgagtttttatccccttcatttgagtttagataagataatgtataggaaactggaaagcactgtacctgtgaagatggtaggtaatgcaagataatccttagggccttaatagcttaggtagccaaaataattgagatgggagatggattaaaaatgagggcaaataatctagcatttttgcattttttccttttaaaatttgaatgctcttatgaatccaaaaaaacatgaaacaatacaaatctcagtgaactctcacgtctaagatagttttccactgattttatttttctcttgaatagtggtgatttaaaaaaaaatcgcaggtatattttttatctattaaaaatatcatagcatcctggtaaactctgtcataattttgttttgctgtatttatttatttactcctcagtaagtagttattggatgcctagtctctgctggacactgttctatgttttatgatgaacaaaccccatgaagttacaagcatttataagcattcattgctttaggttctagggagtataatatgaatttgactgtgtgaaacttgatttagaaaattggtatccacattgggttaataaaatttagtttttaaagtttactgaactgtaatttaaaaataatacagaaatagttattaaatggtgattttcagtggagcaggtgttatgccataaataggaccccaaattttatattttttataatttttaaaaattatagagcaactttagctttacagaaaaactgagaacaaaatgcagagttctcatgaattccttctaccctttgcacaatttctctattattacaaccttgtattagtattatgttttatttgctatcagttactcaatgtgtatttattaaacataacaaaataataaataaatttattatttatgccctatttgttattatgaaaagaatacatcatattgctgcctctcaagctgtttataatgttatgtagctacagtttgaggtttctcatttattagaaaaattttttttctgtgcacttagtgcatgccttattcagtgctagggcttaacacattatctggacatagtagacatttaataaaatatctgctgagtatacagacaaatgaaatgaaggatccagaagtaaaagacgcaattcttgtccttaggaacttaggaaacaacagacacacatagcagtgactggagaaaatttcagaaatacataaaatatgattaaatctctgataaaggagacattggtataggcaaatgaggcataaagccattaccaagagccccatcctctttttcctcctttttgggactgtacttttttttaattttttttatttgtttgagacggagtctcactctgtcacccaggctggagtgcaatggtgcgatcttggctcactgcaccctctgcctcctgggttcaagtgattctcctgcctcagcctcctgagtagctgggattacagacacccgccaccaagcccagcaaatttttgtatttttagtagagttggggtttcaccaggttggccaggctggtctcaaactcctgacctcaggtgatccacctgcctcggcctcccaaagtgttgggattacaggcatgagccactgcgcccggcctgggactgtacttcttatcatcaccattgtctttgttgccatggtcttcattattatcatcataattatggctatcgttctatgtctaaatccaagcattaaagaacaaactcccatatccccatggtaaggttggagaagtgcgtgcaagtgtgtctatgtgtgtttttggcaattttaaagtacagtcacaccaatatatgccacttccatttcttgctggaagtaaaatgagtgactacttgggctttgtaaaagaaaatcgcactttggaagtccttgtgggagccataccaaaatgccttgcagtactgtaacttctcagaggcatgtaaaagttagaggattggtgaagttttcaaaagctactggcacttgtccttcaggatgaaccctcttgagatgcaggggagcaaattgacctcaataagagagtagtgggagctaaattcactcaagaatagcaatctgttcctcagacagatgcagttgtaattttagaatgtgtacataacagacagtttaaaatggacataataacgctaaaatagtatcaatggaaattaaaaataagtcctaatcccaaccaaaattctagcaagttgttttgtggatatcaacgaactgattctttttttttttcttttttctttttctatctttgagacggagtcttgctctgttgcccagactggagtgcagtggcgcaatctcggctcagtgcaacctccacctcccaggtccaagtgattctcctgtctcagcctcctgagtagctgggattacagacatgcaccaccatgactggcctcaaccagctgattctaaagtttatatagacagttaaaagaccagattagctactgcaatattgaatgagaacaaagtcaaaggactgacagtacctgacttcaaggcttactgtaaagctctggtaatcaatacattgtggtactggtgaaaaaataaacaaatagatcaagaaaacagaatagagagcccagatagacccatataatgtagccaactgttctttgacaaaggagcaaaggcaatctgatggagaaaaggtagtattttcaacaaatggtgctggaacaattggacatccacatgcaaaaataatgaatcttaggtataaaccttacatccttcacaaaagcaactcaaagtggatcatagaccaaaatgtaaatgcaaaacaatgaaactcatagaaaataacataggaaaaaatctcagtaatcttggatattgtgatgactttttagttacagcaccaaaggcactatctgtgaaagaaatccctgattagctggacttcattaaaattgtaaacttccactctgtgaaagacaatgtcaagagaatgagaatacaaaccacaggttgagaaaaatacagatggtgctgacttaaaacggttcaacttacgatttttcaactttacgacagtgcaaaagtgatactcattcagtagaaatagtacttcgaattctgaatttcattggacaaaactatggaaacagtaaaaactattcgtagttgccaggaattaggggtgagggagggataaattgaacacagaggatttttagggtagtgaaactgttctgtggttactacaatggtggatgtatgtcattatacctttgtcaaaacccatagaatgtacaacactgagagtgaaccctaagacaaacaatgtactttgggtgaaatgatttttttttttttttgagatgaagtcttgctctgtcgcccaggctggagtgcagtggtgtgatctcggctcactgcaacctctgcctcctgggttcaagcgattttcctgcctcagcctcctgagtagctgggattacaggcgtgtgctatcacgcccaactaatttttgtatttttagtacagacagggtttcaccatgttggccaggctggtttcgaactcctgacctcatgatctgcccccctcagcctcccaacgtgctgggattgcaagtgtgagccaccgcgcccagctgaaaatgatgtgttgatatcacagaccattaggtttattgataggcttattgattgtaataaatgtgccaatgtcgtgagggatgtcaatagtgagggaggttttgtagcagaggacaagggtgtatatgggaacaatctgtactttctgcttaattttgctgtgaacctacaactgctttaaaaagaattaaagtttaatttaaaaaatctgcccaatctccaaattctaatactttgattccatcttggctacttctttcttatttgaaggcagtcattgtaatatagttataatcatgagcatctgtattttaaaatgcttaattttgtttttcagataagtaccctaaacttaaatgatattattttatttattaaagctacctgaggcagaaatgtttcaaaatcttgaaaaagactaattcaataggttaatagcagataagtaggtatttttgtgtcatactcttcaaattataataactatcacttaaagaatagtcatttttgttcgtttgtgatccttccacctcagcccctcgactagctgggactatatgtgcgtactaccacacctggctaactgttgttttttgtagagatgaggtttcactatgttcttcaggcaggtctcaaactcctgggctcaagcaatcctcccaccttggcttctcaaaatgctagtattacaaacatgagccactggacccaccctcattgagctgttttaactacaacttggtatggtagaaagagtgatgggccaagggttaatagggtgagattctaattttaactttgccacctacaagcagtgggactttgtgcaacaatgttttaaatctttctgcatttaaatttttctcatctgtaaagggcaatatacaatttctgtattctccagttcagttatgctaatcgctgtcctgtcagcacccacatccccatattcactttcacagataagacttgagtcgctatgatcttcaccctagttgtcaccctgtccccatactctctgaatatgctcctctctcctctcattttagccaaataccactcttctttgaaggccagcttaagtttcagatcctccatccatcccagatcttcttggaatccctagttcttttggtcagtatcacttagtttagcaaagaccatgtcttaggtgattgctctaactcaccttatagcattaacccataagtgagtacttactgaactctcactgtatattagattaagggcttattttatatgcctggcacagttcttatttgttgttggaaaaatttttagagggcagtaattgaaatgtcatatactatagtctttgaggatggaaaagagctcagtaagtttctattaattggttatgccgttaagatcagcatctaaagagagctaggtcatggaaaaaatggcctaagtactggacttactatcagaagtactggacttaaattttaattcttatgatttgtgaacattgtagaaatatactaatgtctttgtgagtacagataaggaggaacagataagcttatgtgaaaactcggtttgtattgggtctatattatatacagggctattttattttatttatatttatttatttatttttgagacagagtctctccctgtcgcccaggctagagtgcagtggcgggatctcggatcactgcaacctctgcctcctgggttcaagccattctccatcctcctgcctcagcctccgaagtagctgggattacaggcacccacaccacgcccagctaatttttgtatttttagtagagacagggtttcaccatgttggccaggctggtcttgaactcctgacctcaggtgatccacccgccatggcttcccaaagtgttgggattacaggcgtaagccaccatgcctggcctattttatttatttatctatctatctattttttgaggtggaatttcgctcttgtttcccaggctggagtgcaatggcgccatcctggctcaccacaacctccacctcccaggttcaagcgattgtcctgcctcagcctcccgagtagctgggattacaggcatgcgtcaccatgcccggctaattttctgtgttttttttttttttttctttcagtagagatggggtttcttcatgttgattaggctggtcttgaattctcgacctcaggtgatctacccgcctcagcctcccaaaatgctgggattacaggcgtgagccaccgtgcctggcctgttttattttattttaacaacaaatagaaggtggttattccaggagggtttcagaatactaccccagatttggtttctcctggtttgactacaggcagtgctggtgtctttctcttgatcatactcctttcctcatgggtgtgttcagtcctctgatgatagaagtgcttacctttatttaacctttccctctctcactgagtgttctctctttcctgaaatacttttcatttgttaaagcttttaagaaattcttatttgaacattcagtgttatgtaaaaaacaaattaactgctgcttaatatcatgtttggaggtgaaaaattttctaagccttttgcttagccatttattaccaaaggggtatcaagcttggatgtcaagctaggatgtaaattctagacctatacaattccttcaagggcggctgaaaagttgctttctaatccttttgctatattttggtggcaagctttgttttcacagtttaaagaggattgatggttttcctattgtctttccttcacaactttctgaagttcacttgcctgtttcattttcatgacttaaggtaccagcttcttctgcccctctcctagatccaccagcgccccccatgctccagaaaaattgagctacactgtgcctttccctgagctgtagaaagttccacctctaggtttccaggtgcttctgatcatcatttttcaatggattgagttgccaacatctacaaaatatattctaacaaagatgctcagaatgtctggtgttgacctatctatacaggtaaacttcaatgactctgcatttccctttcactgctgacctcatgccttttgcagaagtaatataggaaagaagagcattgaaatagggcagaagatctaattttctttttctttcttgagatggagtctcgctctgtcacccaggctggagtgcagaggctcggtcttggctcactgtaactccgcctccccggctcaggtgattctcctgcctcagccttccgagtagctgggattacaggcacccaccaccatgcccagctaatttttgtatttttagtagagacgaagctttgccctgttggccagtctggtctcgaactcctgacctcaggtgatccacctgcctcggcctcccaaagtgctgggattacaggtgtgagccactgcacccggccagaagatctaattttctaacttacaatgtactcgaatattgaaaggaatttcatatttttagaactaagccctcattggggttgggtacggttagggcaaggagaagcctgggaaggagttcttgggtagttaaattggaaaaagagagtctggcacattcagaatggctccatatttgttacccgcagactgtacataagaaatgagacctggctattaagagatatgatgcctgtgaaaaccctggatacacttgcaacttgctttttcccaagtgtttaggactctagtagggacacctccagttccttttggaaataagctaatatttggtttccaaaaatgtattgaagtagtcttaatgagacaaatagaaaatagaaatttgattgaatgttcttacgttcttaaaaatgctactttttagcatttttaaaaataatgaagtacatgttggggtgggagtggagaagagactgtaatatttctgtatctgaagcctccataaggtcttaatccagccctccataggaacataagccataattgtcatctacaacttgttcctaaatttactcagctacagtttctcagagctattgagggaagtactacgatgctatttaaaaatactttcaaatccatccttatgatgatgaagttattatagttacaaatgcatgattcagcaataggcattaggaaaacatatccaccagacagcctgatgatcatggtgtatgacactttcttctgaatacatgagggttagatgaaagtggtgacaaacgattgagatatctagatccacattatttacctttttttttttttgagacagagtctcgctctgttgcccaggctggattgcaatgacacacttggcttattgcaacctctgcctcccgggttcaagtgattctcctgcctcagcctcctgaatagctgggattacaggcatgcactaccacacctggctaattttgtatttttagcagacagggggtttcactctgttggccaggctggtctcgaactcctgacctcaggttatctgcccacctcagcctcccaaagtgctgggattacaggcatgagtcaccacgcccagccaaccacacttcttaaggctagataaatacatagctttaagtgtagagtaaatggtgtctcacttgcaaagaagaggatctcttggtcctctcctttccccaaccccaaataatggctttgctattggcaatgtaaggtgggtcggaaagtttgtgaagcaatggccaagggccttatggaacaggcatactgcaggggtggcgtggtcataagttgctgatgaagcagattctctgtcactcatgcctggtgaacaggcggggactcccttcttcaagagagacaggtgatgatagaagagtagacagccctgaacaaacctttcctcaggattgtcccttttggtattactcagacctgaataatacatggacatgttttatagggaattttttttcagctttttgggtgatctattattaggatcttattaaaatatgtataattttaaaactaggtatacacttcttatgcttatagttcttatgcaactatagagccaaaacaaattaataaatgaaatcaactatatctgagcagacctcaggatttgagagagagagagaaaaagaaatcaaatataactatgaaacccaataaaatttaaattattttaatgtgatagataatgtggttttgttgaaactaatcactagtgtggaacttaaagatagacacagtagaaccatgtatcctcagggtctggtctatgtttaaatctgttatttaaatgtattaatttcatgcaaagcatgcctgttagtgtaagtatgttgaacaaattgttattaatagctttgagggttcataagttcaggaaaataagatcttaacccaaactctgtagtaagcaatcatcgaatgtcagtttctatgaggtgtcatttgataattttttaaattgtttactcacttgaagatagggttagcattgtgttgatattaaaattggtactaaatggatatctaatccatttactaacagaatcagggacagaaccattcttctttgtgtgtttatgcctcaagtttctgcttataagctggtatgtgttagtatgtaaaaagccaaagtccccatagcacatctgctcacagcgtgaagatggcatcgaatcctatggctgagtagattgaactgcctcatgccatgcaacgactcagttttcccaacatttcctctatgtccagattgatccttgacttcatctggctttcactgggcatttgtgcaattgtaaacaccaatgaaaagccaggcagtgaaattgcatgatggttactgcttgtattaaaatgttaaattataatcgaagacagaaaattttttaaatcctagaactcttgtggactgcaagatatttatcctttgagacaaactgctttaaaattaaatttgggctccacggttctcaggaaaacttttctcatttgtggtctttcctttaagttccattaataattaaaaatgacaattgtgaggacttctgagtaatgagtgtttattatgctctaaaatttaagataagcactttacatatgtaatctcatgaaaaccttgtaattggtgtgaggtgagtgctttggctattttacatgtgaggacacatgacaccaagaaaaggtcaatcacatgacaagtaagtggcagcagcggaatttgaacctatatctttctcattgcaacgcccaagccttacacactaaagcctcttcttatgtctccatttcacattgtgaaaacctgtttaactgcaactaggaaccagtgctctacaattatcctcttacattcctgtcttttccattgggccagtgggtctcaatctttaatatgcatcagaatcacctggagtgctttttgaaaaatgcaggtcccagatgccactccgaatttactgaataagaaattgtctgtgcaaatgtccagggggcctgaatcttttaaaacaacctccctcaggtgattctgttgcaggtgtctgtctgatcacattttgtgtaaaactgcattagactgtggatgcctcaagaaccatgacttttgaaaaaatccatccttgtacctcaaggactcactcactaaatgcttgtcaaataagtaaaagaatgaatgaaggggcaattgtcaagaaagatgtgttcttgggaagaatacgcttttggccagacccttggaaaatttagagatgcatgtttaaatatcacttaatatactcggtctagactctccttcctggaggccaagcatggcaaagagccgatgagagggtggtagaaagtacaaatctatctataaaaaaaagaatgaaaatgctcctgaccatccaggatgagatagaataaatcttcccctgcgtttctaaaactaaagtcaattgaactagaaatatttaaatgcacttgaggcccagaaagagattcatttccttaatgttttgtggacttgacgttttctacttaaatcatagctctaaggtcaatatggatttgttaccggcaaggggtcccaatctacaccccaagagagggttcttagacctcacgtgagaaagagttctgggcaagtctataaagtgaaagcaagtttattagagaaggaaagaaacaaaagaatggctactccataggcagagcagtggcatgagctgctcaattgggtatacttgtagttatttcttgattatatgctaaataaggagtggataattcgtgagttttctggaaaaggggcagggatttcctttggaactgaggatccctaccctttttagactatatgaggtaacttccagatgttgccatggcatttgtaaactgttatagcgctggtgggaatgtcttttagcatgttaatgcattataattagcgtctaatgagcagtgaggatgaccacaggtcactttcatcaccatcttggttttggtgggatttggtaggtttctttactgcatcctgctttatcagcagggtctttgtgacctgtatgtgtcttgtgccaacgtcctgtctcatcctgggactaagaatgccttaacctcctgggaatgccacccagcaggtctcagtctcattttacccagtccctattcaagatggagttgctctggttcaaatgcctctgacagattcattcctgtatttagcaagaggttttttcctttttttttttttgagtacttactaagagtcttgtatttaataagacatagtcctttccctttctgagtttattttcagttagaaaattccgggagcagtaaaagagcaatgcaagtaaatggggggctagttgctcagaatctgcaaatgtaagagtgcatggaagggtttgtatagccaggggactggtgctggatgctgcaaattgaataagaattggaataaattggatagccaggtagcaaagagcagtggaacagacacttggcagtcagattgcttatggctggctggttcagttaacagtgaggacaggagcctagggtggtgggatatttgccttggggagcatggggaaataacattgcatagatgggttttctgacattaaatagagctttggatgttgtggaattttgaacatttcctttatctgaaagccggtgaagtgttgtcttaagatgtgacagcagtatgtaagcaaattgcaggggataagaaatcaagtcagggagacccattagagggctgcattctcagaacaaggagcactgaggaaaaaattaaaaaacaaacaaacaaaaacaaaaaaagaaggttgctttcggtagtccagatgtgaagggacagggtttagaccagggtggtggagtgcagaaagaaaagccagagggatgtggaaggacaagatggcatgaccacgaatggtggcaaaggcagcgtggaacaagcacatcagctgatgtggaatgtatgagaacaaaaacactcattttcccaccagaacccttagtaggagaaagtgccttaagcttacagtgaggattccaaattgaaattgctcagtagctgtttcaccctttgttactggcagagcagatggctctggaagagactaggactacttgttgcttctctttcccatctctcaccactccccaaccttatcccatagtgaggaccactcactagtgacatttctgcttgagacctacaaagcaagtcttgctaatgagacttaggcactttttcccaaagtgcaattcttggaaatctgtgggttttaagtagattacagggccacagttccgtggtcaaattagttcaaaaaatattgttagagaattaagcaagtttctttactgcaggatgtcccacagtctttaatatggtaatcaacattttgactatccaagagagggcgagcttagagcactccacaaactttttggatcatggagctctttttaaaagaagcaccttgagagaagaggatggcacagcatatatttaaagaaattagggactagaaagtttgtctcttgcactagaggttggtagtgtcatgcaaagaaacaagagttgggatttgggtccaggctttgccactaactggtgatcttgggtaagtcattgaatgtctctgagcctcagtttccccaggggttatgttcattctaaatgaactcttcagctcctttcaaaagtctgtcttcatattcaaaaaggaaaataatctgcaatttctctactctgcaataactctggtggtggaggcagtggtaggaaaagagagagtagagcggacagtgacaagaagatgaataagatacggtctgaacccctgcactgattagactgttgggcacaattacagtgctgggctgatgtaacaaagataaatgaagtttgtagtgtgttctcaagcttctctgactccaaccacatcatgtgatatacagcaactagttcagttgctaagcaacactaattcccaatggtcacttaatccatctagtctcagttctgctactaagaagctgtgaggccttggataaatcagttaaccctttgggtttgggttttcttcatccgtaaaataaggaagttgggttaggtctggaaccatttttaagttgacctgagtcttacctggaagaaggtaaaggaaacacagctattctcctctcacccaccctatgcagatgagccccaacattctgtcttcgcttttcttctcttccttcctcctggatcacttaatctgtctcagactttaattattgcatttatgtagttgaagttcaaatgtggatctctaagaccaacccttctcttgaatgccaaaatcaagatttgtctacctgttttcattctaaggaaaccaaattacttatgtttcaaaccaaactcacaatctccccttacaaaccaattcctcctccacgttaaaaaaaaataataataataacagaccaggtgtggtggctcacgcctgtaatcccaacattttgggaggccaaggaaggcagatcacttgaggtcaggagttcgagaacagcctggccaacatggtgaaagcccatctctactaaaagtacaaaaattagcagggtggggtggtgcgcacctgtaatctcagctactcaggaggctgaggcaggagaatcgcttgaacctgggaggcagaggttgcagtgaactaagactgcaccactgccctccagcctgggcaacagagtgagactccatctcaaaaataaatacataaataaataaataactatgtgctcctggtcacatgcagcccagactcccaggcttttcgactccctccttcttccctcctgtgctagtcattggtcaattctcaatcctctccacattattattattattttttgagacagagtcttgctctgttaccctggctgtagtgcagtggctcgatctcagctcactgcagcctaagccttccaggttcaagtaattctcatgtctcagcctcccaagtagctgagattacagtggatgtgtgccaccatgcccagctaatttttgtatttttagtagagacatgttttcatcatgttggccaaggtggtcttgaactcctggcctcaagtgatccacctgccttggcctcccaaagtgctgggattacaggcgtgaaccaccgcacccagcccctctccacattattatatgtccacattatttatttccctttcctgatgtcattattgtacgtcaggctttcattggtcatcctgccccaggtctctcctccaaagcaacccacatgccaggttcagcctcacagagcttctctgagcctgccatcccactctccaaagcctttcccggctctcttgtgctcactccttgctggcatttggagccctgcgttttcccacctcaatcatcttccagcttccagctttgtcttcgattacctgtgtgttcctgtcctcccgccaactatttattaatcttcttatcccataacttgcccattcaaattgttcccttttcttagacttttgtctgcattctttctatctgacaaaatcctagtgatatttcaagagtcagctcaaataatggctcctcactccaacaaatctttagggaacactcaactggcttgatttctccttcttttagcaccttgttctttcctttcttactaccttaccaacccagacatatatatctactatatcttgtaatatccattatatcttttttgaggccaaggaacatgtttccttcatctttctatcaactatagtacatattacatactaggaactcagaaacgtggttgaacaaattactattaaattattaagctattaaaacaataatctattgaaataatgtaataatcttaatctcctaacaaaatactaattaaatttaagtaaaataaataatctacaataatccaaaaatgagtcgaatcttggtttactctttggtgttttgtcattctactttcgtgtcaagtttagaaataattttctgaagaattttgattttgattttagttataactttgcgttagtaagaccatcagcctacggttaaggatatttgtctcacctgtgaaatctcactatctccatgaaaccgactggcttcgctacatcatgggaagggtgttatctttcctagttggagcatcatatgatgatgtggttgaaaacatgcactttggcataagacagacttggtttggaattctgactctgcccttgttggggctgcttggggaatttagttagcatctctaaatattagtttcctcatttgtaaatggaggatgtaattgcaggtgctggttctactcttggaaggattcaaaaattgtcatgcttacctgaggggctcctccaaacctgggcggggttttctgtatgccttatggacctacaaatgcaaaccacactgactatgtaattttgggggcagattggaaagctgaaacagaagtgcagggactgttggtgcccatcttcctggcctggtggggaggaatgtaggaaagcagactcgtgcttctcatcttgaatcagacagacgacagacactccaggaaattccttttgtttggaaaagaaaaatgctctgccatcttctcttaccccagttttctacattcccagacttcctaaaagagtagaccactggggttccctgaaaagccagctaagtccagcacatacgatcagccccacagctcattttggttcacagacaataaggagagaggacttaacaattactgagtgctgagtacccactatgtggtaggaacattttgtacataattacaattatgcatcctcataactttatcacataagtatcatctctattttacaagtagacactaagcaacctcccaagattgtacagctagtaaatctgagtgaggaagtgaactcagatggtctacaaaacttttagcatttgtggccaggcatggtggcttacacctctaatcccagcactttgggaggctgaggtgggaggattgcttgaactcaggagttagagatcagcctgggctacaatggcaaaaccttgtctgtacaaaaaatacaaaagttagctgggcgtggtggcacacacctgcagtcccagctacttgggaggctgaggtaggaggatcacttgaaccaagaggtggaggttgcagtgagccatgatcacgccactgcactccagcctgtgtgacagaacaaggccctgtcttaaaaaacaaacaagcaaacaaacaaacaaagaaacttttagcatttgagaccttcagtgtgatcaaagcaaattagctttgtgaggtggggtttcctttagcttctacgtcagcaaaattgtgaaccaacaggattaaccttttgccgtcttagtactgcagggaactagctttcagaaaattgtttgggggccgggcatggtggcttgtgcctgtaatcccagcactttgggaggccaaggtgagtggattacctgaggtcaggagtttgagaccagcctgggcaacatgtcgaaaccctgtctctactaaaaatataaaaactagccaggcatgttggcgagtgcctgtaatcccaggtacttgggaagctgaggcatgagaatcgcttgaacccgagaggcggaggttgcagtggctgagatcatggatcgtgtcactgcactccagcctggatgatagaatgagactctgtctcaaaaaaaaaaaatactgtttggggacattttggtcctgttttcttccctgacgctgatgtgatgctgatgatagtgagtgtttcaagaaccaggagaggctggttgttgtaaacattcctataaacgttggctcagagattgttaatgtaagtttttctggagcagtgaggtaagccccaagtagaaaagggcagaagtatagtaaaatttggttgttttgtcaactttgtaagacttcagctgcataccttgttaggaaactagaagccggaggaaagttgtgctgagatgtgtagcatttgttcttgctttgtgtggccattttattcccattaagtactgtatccttcactaaagaaatgggccattcagcagcccgcctgaacactgcggcactgtatattgttatagagagttatatccattcagaggaacacaacagatcagaggaaaggaaagaggtaaccatgtatgcagacgtggaactgtccccaacatgtataatagacaagccaaggtgaaatatatagcatactaatattcaactttttaaatttaaaaaactatgcatctcaaggcatggtggctcacatctataatcccagcactttgtgaggccgaggtgggaggatcgcttgattgcctgaagccaggagttggagaccagcttgggcaacatagcaagacctggtctctacaaaaaatacaaaaattagctgggcatggtggtgtgtgcctgtagtcctagctacttaaaaggccgaggcaaaaggatcacttgagcccgggggttcaaggctgtagtgagctatgatcactccactgcactccagcctgggcaacaaagcaacaccctgtctaaagaatacaacagcaaacaaacaaacaaaaaaccaaaaaccctcaaacactataaatccatagtttttatatatgtgtaaactatttctagaaaattactcaagtaactgataattagttatatctgaaggagggtgatggtgcggtggtaatgagactcacttttcatcatgtggagcagtgattcccagtgtgttctgggattctggggagtccttgagaccctttcaggagatccatagatcaaaattattttaataataatactaagttgtttttattctcattctctcacgagtgtacggtggagttttccagaggctcagtgacatgtgccattgcagcacactgaatccagaagcagatacgataatccaactgtgtctggtcaagccaaatatttaagagattttaaaaaatgtaaaatgatgtcattcttctcatgttgaagataaagttatttttataacaattttgaagataaagttatttttataacaattattattcaacaaaattactattatttaatgagttaatacacaataaatttcaaattctcagttttaatttcttaactgggcaagtatcagtttaggtataaacaacatccctccgagatcctctgggatacatccaattcctttagtgcctggtgtgcttggaaggtttctgttgcacggcgctggacaggagtgccaaagaggaaagaaatgtgaatggaaccaaagtctataataaaatattgctttctctttttcccagcctccatcaagggagacctacaagttgcctggggttcagtgctctagaaagttccaaggtttgtggcttgaattattctaaagaagctgaaataattgaagagaagcagaggccagctgtttttgaggatcctgctccacagagaatgctctgcacccgttgatgtaagtaggtccagtcactgaggctctgttaccacatgagattgggagtggtgtggctcacattgaatccccccacttatcctgcctggtgtcacagggaaagttgaacacttggtttctgtgcctagagctgctatcagatgagaagacaatgtatttgactatataggaaatctgttgtggactgtcaattaactcattttcacttccgttgatttggttgtgaccagccctagattagagggcagttttagagtgtcctggcctagaatgtcttcctcagttttgagtaagccagggtatctggcctctttctgggacttctctgcccttacaggacccactggaatctgtagggttccagcgtcaatctgtgttttctaatattacaatttgtttttattttttatttttaacaattattttataagttgttttcttctgggaataatttgaggtgatttagagtaaaacaatacttaatagaagcactacaaccagaataatagtacaagagtcctgtaattatattttgggggaattaaatgtaagaaaacctagcccagggatactgattgcagattcatacagtgcttagctgggactcaaggcaaaaagagaagcatgctatattgcagaacttttattaggaaaccatttccacatatcaaggtggtctgctgcaggtgaattttggtctgaatgggacttctcagttcatcctttggcaggctaaaatcccactgaggatctagaactgtagcaatttctagattgtgtctgagaccttcccagcctggagctccatatctccttcatgcctgtgcctctagcatctagcacagggtctgacacatggaggatgctcagcgagagccctcagattcaacttaggctttactgtattctgcacagcttctggaatgtgtgctgaatgaatgaatgagtgagtaaataatgtgaatgattattgggataagggtggggctaaagtggtattttcttacattccccagaagatttcttcttcctgtcgagatgctttttggattatctcttcctttctgtttattatctagggaatgcctcgctgctctttagcttcctggtggtaataattcacttcatagtttaatgtcttaggtttccttcttcccacagattgccttcaaatttgccttttcttcctccctccctttcttccttcctccctcctttccttcctcttttccttccttatgatagactcttggtatgggggagttaagaggtcttaacttgagccttcacagtgtatattttagaatgaataattcattgctatgcttcaccaccaaccagaaattattacagggtttctctattacatgagatttttcaaacattatttatctatgatttgttctgctttacctttcagaaactatcactgtggtcttttcttcccctgccactggagttttttttttttttttttttttttttttaacagggttttgctctgtcacccaggctggagagtagcagtgtaatcttgtgcaatcttggctcactgcaacctctgcctccaggctcaaattatcctcccacctcagcctcccaagtagctggaaatacaggcacacggcaccactttgtattttttgtggagatgagggtctcactatgttgtccaggctggtcttgaactcctgagctcaagcaatcctaccaccgtggcctcctaaagtgctgggattacaggcatgagccaccatgcctgggcaccaatcttaaacaatgatttccataaattactattagaatattcaaggcatatgctatatatagccttgtcctgtgaagcctgattttggtgcactcctccacccccactgtcatattatccctggaactatctcaaacaccttggctcctccaggaagagtccttctggtcaccaattcaggctcattctctttctgggaacgatcagactgagtatttcaatctgtttagagatttactaagttttagtttcttgtgtttcttattaatagggagaccaaataattcagcatccaatctggagaactaatgaggacaggagaagttattaataggtaatctggaacataaggcatactctggatgggtagccacctgcttttcaaagatcttgcctctttaatgggtactgagagcagaagggtaacaacagcctttggagattgaactcctgaattctgttcagttgtctggggctagggaactctgacacagatattgtagcactgagtatttctaacaagctgtggggggcctgtcccctagtggatgttagagttcccagagggagaagtcaagaccactgcagcaccgacggccccgtgcttatgagatccagtggtggtacccctagtcagtcttcctccaccctctccttcctcttttcccttctcctccccttcttcccttcccctccccactccccagtctgctcccttctctttttgatccttattctctccctctcccttccaacgcccccacctcggctccctcttgttttgttttctctttccatcgccttctctttctccattttcttctctccctttgccattcacagtgtcttcctttccttttctcttctaaaatggctcttccaaaatcactggagggcagctcaaaagagcaactctgccaatattaatttctccttgaaagggaaaagcctgcatttccaattatgacttagtcttcattagttagaaactgtcttttttccacagcaagtggcctaggaatggtgtgtttctcgcaagtctctggtcggaggtcctggttttatgtattctgctgtgcacgctttctagggcatgaagacagggcaggctgggccattggaggtgggggtggcagtgaggatggcggtctggctgtgacaggaacacacctggaaatgtctgcttgtcacagaatggattgcagctgaagtagacaaaactctgtgatcatgttgctgcataaacctcgatgtctgaaatttgggacgatggctgtgccaggattattttagaaaggcaagctcaggatcagtgttcaactaaccagagaatctacagctgctgtggatgtccctccaccagagagagagagagcctagcagaaactgaggagagaagctcttcaggccgctcaatggctcacgtccgtagtcccagcactttgggaggccgaggaggaaggatcacttgagccaggttggagagcagcttgggcaacgtggcaagaccttgtctgtacaaaaaaaaaaaaaaaaaatgccaggtatgatggggcctgcctgtcgttccagctactggggaggctgaggctgaagaatggtttgagcctgggaggttgaggcatggtaagccctgttcacatcattgcactccagcctgggtgacagaatgagaccctgtctcaaaaataaataaataaataaataaataaataaataaataaataaataaaagttcttcaaagaggaatggaggggaggaaccaagggctgacatggacaattctaggtaaacagggctccagaaacattctgaaaagcataagctgagagcagacttcagtaacatgaagaaagaactggggaggaggggagcggtctagagaataacatgctcttatttgttcatgggattcataaactgtggacaatatttttatttaccaaaaaggtaacaaagtttattgagcacctgtgatgtgtaagggactctggaagtattttgaagggatacaaatataaataagagataactccagccttggtttctcatgggctaataggaaaggaaaggaatgaaaaagagaattacactcaagggaggtaagcatgagtcaggacctgacaaatggttgaaggaaggaaaggacacttgtagctgggatgttcaaggaacacatgctttgaatatggagggtgtggagcttgacctaagccttgggggctaggaaggaatttgatatgcagaaggaaagatgtgggtcattatccttggagctgacctaggcagtgaggacccagagtgatctggcgaacacagactgtgctgggcatgtggagtggaggggaggtaggaaacggctgtctacttggggcagaggattgggttgaggagtggtggaagataatactggaaaggaggacacttgccagaatgtggaaagccctgactgttggctgggctaagacatctggacagtctggacaccattttagggattcagcacgtgcgttttacgtgctctagcagggaaggatgactttactgttagagatgctcatttctgatgtccctctcgctgagtgtgagtgcagtcctgaataagattaaaggtgtcataactataaaccatttggaaaatgtaaaaatatatatgcatgagacacttggagcaaggattttctaaggtctcaatttcttgtttttgctttgattgttatagcttataagagtagatttaagggttagccacaaactctattactgtcagagcagatttgggctgctaggtagaatcttattttcactgtttcaattctcatttctttgtaattttttgtattatactacatattttagccccaaattgtgggctgcaggaacaacgttgttaagtatttcttgctggctgtgttcactgaattgcttcctgagcctgaacttgctcaaacttcctgttttttgggcacagaactcctggtttctccatttatgatggatgagaggggtttggagtctctcttctagactttcatagcatgtttcaggatttctcactgatatctaattgtcttataagagacattaaatttttttcacactcaaaaatccatgatcccctctaggtaaggtctgagtctctgtcaaacattttcgcttttgtgtaacatttagcacagtatttatcaggcattattttgtttgggggtagaggaggtaggcggcggtgggcagttgggaccccccgtacttatgttctgctccaatattaagtcttgtagaaaatggtctaaaatagatctttactatctgaaatatcatctagtgagagcattggcatcatcaaagagcttgttaaaaatgcaggatctagaacctcagactaaatcagaatctgtaatttgattggcctttgagacttgctggtctccagatgtaatgtatacacatcacctagggatcatgttaaatgcaggttctgacactcaattacttaggtaatgatcaaacaaccagatcttgaagttttctaacatcaaagcagcaacttcctttctagagttgtcaccggacaccttccctcctgagagtgacacttctgcgcagaacagatggtttatgacaggagttggaaaactgtggcctgctggtggcatccagcctgccgcctctttttgcaaagaaagttttattagatcacagtgacgctcatgtatttacatattgtctgtggcttcttttgtgctgtactgactgagttgaatagttgtaaaagagactgcatgacacacaaagccaaaagtatttactatctgggactttatagaaaacagtttgctgaccctggcttatgtgagtgactctaaatatttccttaaagaatcaaatagctatactctcttgccccagtggcaaacttcgcaagcccatctgaatccatggctattcatagagaagctgaaccataaaccgtcattcccaggcaacctacaaagggtcttgagcctaaaattggtctggataatggtaccacagagcctgtgactttccaacatccatttaatatgtccctcctcaaagaaatggttataattttatataattttattgagctgactccctcctccacaaattgatttcattaattgttcaacataagtctgactttccccaagaattggaatcaaaaggaaattctgagtaaaaatatatctgggaccaaggaaataaaaagacttgtacaagttggttataatacacattttactcctaaaaaggtagcgttggttttggccccactctggcctattcactgggcagactgtatgggcttggagtccttcttttaattcccttggagaatcccaccacctgtctcttatttgggtttttgaattgtgaaatgatggcacacacaagctccaagaatagctgcgtgtgtacaccaagcatacagagacagaaggcagagacttaggccaaggatcaggaaatacagaagagaagctggcatggaggcatctgctccacaaacacagtgaagccggaggttgtaggaggagggaggtgggacccgtgtaatcactggaggatgtgggcactctgctctgctctgcaagtcttggagatcttggttttctttccagaaccaaatttcagaggaggtgggtgtaggagaattgagattctttttcctcatccagagttatctggggccaaagaggtttagggtgagattctgtgggaatctttgctgtagctccagaagctttattcttacttagttccttttccctttgtctgcatagtccaggacactaaaagggtttgtgaagagtccgggtagacataagtggagagtcttctccttaattctagagtctatcttgacttcaaccaattaaagattgtaggagtgaattagagccccttatgttaaaccttgtttcttggaagccctcctggaattccctaagatgcagagctgattagcttagctggtcagaatgtgaaggttttaaagccaaagttattatttgggctgatattttagacattctcttcattggaagaagtacaatgtattcattcattcattcattcactcattcattcattcactcagtgaatatccattgaaaacctattgtgtaacaggatgcaggaaaaacctgaactggagagtcagacacatctgagttcaaattctagtttcttgatctgtgagctaactaacacctcattcagctttccatccaggtgacataaccaccccagcttccttccctgaatctgcaggttaggttggacatttacttctctgcttttgcagcaacttctacaccgtctgttctcataccacattatgtggaaattatccatttgcagtctgtctctctctccagattgtaaagtcattgatagaaaagagcttcatttcacatacttttttacccttagtgcctgacatatattagaaattagacatatgtttattgcactgaaaagaacctaattgtgtggcttaatttccctaaagcatgtgtttctcatctgtaaaatgaaggtgataaaaacatgccttgtgagttttttgtgaagatcaaatcagataatgtttgaatgagtgttttataaatatgaagtgcttgcaaatactaatagttgttctaatatctggattgattgcgattcagtagaaaacaagcagaagagaatcaagaaagtatgtggaggtgtcctagtccactttttctaaactgaataactgaacgagggggatctggagacttcagcttctgaggcacagtttgggtgtgtggggttgacacgggacagaggaccctttccagcaagctcgatgtctctgccattagattatatactcataacagtggggatatgttttattaatttcattgcccctttattcaccctaagcataactaagaaagtgaatatgtaataattggatttcaatgggcattgcaaggccaaagtctcctgccccccaaatctcccagtatccctggcctgtatgtatcttttcttgagaacctgaataatggaaccattagattgaaaacatagattggggagaagagagtgagttgaatttgaaaaatgttgagtgtgacatctggcagtcaaatatgcagggctgactcatttcacttttcatgtgtctgttttagctcacaaactagacatagagctcattgtacagattccatagtgcttaatgcactggctaccccttaaaaaacctatagagcttgctggagggggtcccctatctcatgtcaactcaataaataaatatgtatggatttgttgcaaaatattggattttcttttccatgtaagtaacaaagaactgctgcagatatttgagcagagttgtaaaatgatatgaattttgctgtgagaaaacttgatcttgctgtaatgtatgaaaaagactagaagggaaagaagttgagggtggagagtcttgttaggagggccaggataagagcaggtgggcggtgaaggaggctgcggcagaaccatgccaagcagaatggagtggaggggacttgactacacaagaggctggtgactcagctttctgcctagtattagtcctagagaagtctccctgctctgggaagaccggtgtctagcctcatgtggcttcggaacaaaagccagtgattgcatccaagggaagataatgagaaacacacaggccgtgaaaatcaggaaagcaccactaatctttttgttgcaaaactttacttttcaaagtcctggggaagggtgcagaagcctcagcacgtggacttgagccctgtactcggaaatgcaaaatggaaaccccctaataaatcacagaactgaaaatatccaagagtctgagaggctgggggaggacaggagtgagaaaaggaagggggctggagtactgatcagaagataggagaaagcaacagtgcaaaatgcggggaagggctgagtagacattcaatttaatctggacttttattttgctacaaactaattttatgaagactttttttgcccaaatattaaatatttattaattaaagatattaaaacaggaaaaactgctttcattcaataaaaactctagtaattcttcctaactccagaattgtatgtatatgttttacctattaaataatcagaaatagaaacaaattagacaagatacgtgaataaccttaaaaattttccataatatttgacttaggaactttagttttatgaatgtactctaaggaataccctgaaaaggacaaaatctatacacaaagattatacacaaatttattatagaattatgtactaaaaaaccctaaatgaccagccttgagtatatggttaaatatataagttataagcctttgggttttgagagttttagataacacaagaaggtatttatgatattatattaaatcaagataaaagtcacaatgtaatataaagatatacaatcaatgatgtaaaagtacatagaagaaaactctaatgaaaatatgccaaattgttaactatgatgacttttaggttacggaattatgggaccatttttgtttccttatgcaattgaaaagtcataaatgagcatgcatcactttttcatcagaaaaatatatgagttacatatttttttaaagggaagatattgtaaaggaatatttgttgacagaatgcattaaaaaacctaggtaatttccttatttccctgggattctgagaatttttttactcttgggaatatctttccttgctcttagttattttcatatgttagtcttgttcctggggataaaaaatggtaagtttgctatttgagctctgctcgaacatatggagtagttctctcttacatatacagaattggtttgacattcaaggtctttcagagtcaaatcccaattgatcttcccaatttcacttcccttagtttcctacgtatattttctacacaaatcaaaaaccttttcagacttcctatttcttgtacatgtccataacctcccctttctgaaactctacttgttcctggggacagaatgttcacagagcatgcgttaaacatcataaagtggatcgggagcctcttttaacataaggctgtgtgattttgacaaggcagttagctcaccctctagatctcagatggaacacctgtaaaacaagggactatgttgtagatggttgccaacattccttgcagtgctacagctgagtgaaccttgttccctcatggccctaggtgtgctcattcatctgcctgcaccttgtctcaggttcccactgcatcttaagtggcccctgcccaccccactgtcaaatttgacccttcctagctcatgtaccatttcctttataatgccgtcctcagtgattctgattaacagggacttgcatgtatgatttttttttttttttgccactcatacaggctgccttttatcaaaactatggcacatgtcaatgatataacagataatatcatttgaataaaaagtcaactccatggggaggaaaaaaacctacttaagtgagctttagagataaaggtgaacacttctctaaatcctttgtttatggtctgttaatcaataaagtccaatctgtgatccccagatacataagaggagaaggatatgtagactatttatgatatttctgaaaatcctaagaaaaatcacacacaggcccacagtaagtctatgtttctttattttgagtcagaggatttcttttttccatttttaaccagtataaattggtttaaacttcatctcttgaataactcctaacatgaccagagcccttttcttccttcaaatttccacaaatgcattgctccccttttttcttttcaccacccatatgtccatgttggacaaaaaccatgaaggaaggaggttgagaaactgtgtaccaaaacgccaagagcatctttgccatgttccagcacaaagggcactgttagaaggaggtgatcagagtcatcttctgactcaacctcacaagaggagtcaggttagatgaacagttcccaactatttactctcctctctctctcattctctctctcgcattctttttccttctgttttttattagcagcacaaaagattttgaagtgcttaagggcagaaagcttgccttgttcatctatgcagctcttgctgggaccaagtatggtgctaaacacacggtagacattcagtaagtatttgtggaatgaatgaatgagcaaatgaaggacaggtgtggcttcgatggcaatgggtcagtgtgaactccggaaagagtatgcagagttatagtcaaagtggatgatggatcattgctctgacttactagttatgtaatcttgagtaaacccctttatcactgtgggattaatttccccagctgttgaaaaaatgtgtgtgggggaaagggggagggttagtgattaaaaatgtgttccataaggagcatgtatgtaaaatcatctggcacatggttgcagctgaatagctggcatttatgtagcactttattttttctgcattttttaaaaattaaaaacctgaaaattgttaagttgtactaacctcaaatctcaccacttaagaattatataaaataagaagtaaaatttctcttcccagccaacttttctaattccccagagataactacttttcttaacatttaagtttgatgtttatccttcttgacatttttctaaagtttcatatatatatattttttataattatttaatatatatgtaaactcatgaatatatatatgcaaactcataaatatatatatatatatctccatgcaactttggatggagatatatatacacacatatcattttcaaaatggaactattcatatatgtctatctatctatctatctatcaatcatctatctatctccaagtcaattatttttgaatgatggcagaatcatttgttgtttgaatataccatattttgctgccagtcccccagttccagtgttttgtgattacaaacaataatgcaagggtcttccttgtacatctatatctgtaagcttttgtacagtacttactttagtaataaggcacttgaacacttattattctctttactcataaccaccacaagaagaaaggacagaaattgttattctgtgttacagatgaagaaaaaggagagctaaagggggcaactggcttggccagagacccacacagatagactatggcagaccccgtgtttcccagtggcttgaatttttgtccagagctctttttgtcacactgcaataaagcacaagtcaacaggaaacctttacaaccaggcagagaagcttggatcagggagcaggcagtcacactaaattgtagaaaagaacaaacacacacacacaaacaagaagctcgaggccaaacacatttaaaggatattatttggaagaaatgcactggtggtgagtgagggaccagcataagaagagctgtcctttaactagttaccatgttttatgcaatgttctcaatatgatatccaaatgattaggatggcttagattgcataaatgaggcaggagaatgacaaaggacacccccacaaccccaacaatgacactacccctctccctcaagggaagtgtctagggaaggccagtcagcatctggttaggcttggccttaattgtcatcttcctcaattatctgcaggaaatattagctgttattaaaatttgcagatgcagtcaattgtcagagtcactggagaccaagaattattactcagagcattggagagaggctggaaagaaaaagaacaattcagcctggaaaaatgcaaactaatggataaagtgaggtagggggagtgggggaagaatttagagggataaggccagtagtagggtgaggcagtgaagcactcccctggagtacaaactttaaggggatgccaaaaactcagctatcaagataaataaaattttaattcaatattgaaaaaaatcaagttggcaaatgacagcctgtgggccagcagcctgtttgtaaatacaattttattggaaagccactggaagtaaaggtactgtggcaggggagatccaggctaattctttgatgtgaaaaccctggttaggcttgtgaatgttagacacattagaccttagcttgtgattgatgggaaaaatatttctgaagaaaaggaataatggatctgactgcttttatgggtttcctggggttactgtaacaagtgatcacaaactgggtggcttaggacaacagatattgattgtctcacagttctggaggctagaagtccaagatcaaggtgtcagcagggccatattccctctgaaggttctagagaagcatctttctttgacatctaatttttgatggctcttgcaatcactccaatctctgccttgatgtttacatactcttcattgtgtatgtctctctgtctttgtgtccgtctctctgtctttgtgtccacatctttttctcctttcccttagatcctagtcattgggtgacatcccaatccagataacctcattttaacttggtaacatctgcaaagaccctagtttcaaataagattacattcctaagattacctatgaatataaccttaactctttggttccttatttggaaatagggtctttcttggacacgattcaacccaccacactgttaaagatatctttctaggacacaattcaacccaccatgctattaaataggtagggatggggagagatttgacttaggcgcagcagaaacattatccattcacagaaatctggcagcggagtcaggggcagactcctgacatgatttaaatacctaagaaaatatttaaggaaaagtactttagttcctttggggcgcaaatattataacctttgctcatgtcacatggtgacaaatacatgcaggatttttaagggtagttctgatttcaaacatgcaaacaatagtgactggaaatatttttactaaattttatattccttttgttactattttattcttctcaatgtaagcaacttattaaattattactataaccgaatataacaacttttagatatttttcacaaaaattcaccaaccggggaaaaacgttgtttgtaaaatgcagtattctgatttttaatttatgaaatatggctgttatgcttctgaagcctgttcaaaggctatgaaacaatggagatgatcgaataccattagaattttaagtaagttgaaatgtaaatgggaaacaaatctattttctcccattttccaaacacatcacagtcaagtccaaaaatttgaatgttacatggctttttagtgaacacttttgttataaacatgcgtgtgtaggtatacttaattgtatcagcaacaataacattagttattttaattattgtatcaccaatcctaatcactaatcaataaatgtatactcattaattaataattcaataataatggctaatatttatgaagtgcttatgtgctagacagaagaattgatccctttatgtgaattatttaatttatgaatacagtaattcttccttagaattggtattctgttcatttgggcttgaaatgttctacatattatttttcctgcttttggtcaggagtcaccagcccatttaaagagagacagctgtatctttctgtaactgggctattttctctatgagtgcattaatgttaacagagaagcatggccagcaagggctgctagcacaaagtgaagggccctgctgtgatgaacagagaaattgggaactttatcattgctgctatatacattatcaactaataacacgtttttaaaattcctgaaaagagtttgctttctaaaggttaaaaaggtttaagttctccctgtaattttgtttatatagatgatttgctttgtaaacatttgttttgtttgtttgtttgtttttgagacagagtcttgctctgtcgcccaggctggagtgcagtggcacgatctcagctcactgcgacctctgcctcctgggttcaagcaattctcctgtctcagcctccccagtagctgggattacaggcatgcgccaccatgcctggctaatttttgtatttttagtagagacgcttcaccatgttggccaggctggtctggaactcctgacctcgtgatctgcccgccttggcctcccaaggtactgggattacaggcgtgagccattgtgcctggcacagctctccattttaaggctttgcaattgattgaatcaggctcgttcaggttacctaggatgatcttcctcacgtaaagtcaacccatgatggattctaatcggtctacagaacttcttcacagcaacacctagatcagtgtttcagtaactggggtctacagcctagccaagctgacagatcagaagagccatgacaacaatgataaaagaaactgttgccctctagtttcctcctgggcattaataatttagctaatataaacccaaatactttggatacgattgactgaattcagctttgctgatgcctctgatttcagttgctttaaccaaatgcaaacccctagtgcttctgttgtctgttgatacccagaggctcatgtgatctggaagggtaagtggcttctctctgatttgccagaagaaagtggttatgttagctgaggagccaggacactaatttcagtgatttgactctggtacaagtggtgggaggcccgagggtgggatgctgctttttcctttggccctggtaaacattttatgcttgttatggtggttgaaatgctgtatttaaccttttcttcatgtgccaggaggttcacagtaaatgaggggtgtggtctgtgaagggaaaagtggctgtggcttggcctctttgtaccctgtcagcacacgtacacgcatggtctgtaacatgtgaacctatcacgtgggaactcattactgagctgtgagggctgcccctgaggagctgggggcagtggtcgggagaggagaaggtcgtggggcacagtagaaatggcaccggactgggaatgagttcctactgccaacttctcatcagctcagttcctacagtcctctacttactccttcgttgcccaggacatttatttaatgccaggctaagcacaaggcttccaggattcagcagtgaacaagacagatgctacccttgcccttttggagctgactgttgagcaattttaataaatagcaatgatcatatcattagcatttcccgagggttaccatgtcccaaatgtgtgagttatgatagaggaagatggggttattctaggtgaaggccgagaagcttctgggaggcagtgactaataactactgccttttttactttggagtcatgtcctttctgtgactcccctttccttctcctctgtgttctctcccttggccttgtcaggctgcccctggctttggttctctcttcctagtctcctttctaattagcctttctagcccaataaattaagctcttgtctggaatctctagctgcctgatggacacctcctcgtgaaagccctcagtatctcaaagacacaacatctgtgaagaactcaactcttccattgtattcttccttccctttcctgtctctgataatgttatcacaattcgttttgtcatttaggtcaaaaacatagtcatctttgacctaccttccctatcatacctaccagtcactcagccctaccctgtctattcccatgatgtctctcatctctccctccatttgtttgtcactctcaatggtcagactgtcttggtcacttttctgggcaattgctatagtttaatgcttgcagttttccctcaactttagttcatcctctttagagctaccagagcacatactcttgatacatcttcttgcgtcactctgttgctcaaaagccttcagtggaccactgctgggctctgcagccaggtgcttgtgttctaaacctggctctgtcacttaccagcttggtaactggcaaattattaaccattctgtgcttctattatttcatctataaaacaattgtgtctgtctcatagagttgtgatggggattaaatgagtcaacatgtaagtagtgcttataaaaaaaagtctgacataattttagcattccgtccaggtagatgctctggctcctggtcctccacattttccctcttgtgccttgactttttgcatttctaacttttccctgttatatttctgaatagttttttgcaaagtagtgcacaaattagtgcctggatctacacaaactacatcatacatgatgctcttgtctttcttcatattcttttaaagactatatgttatatatttaaacacatatgcatatttatactaaactaagtatatatatgtatacacatatatacatatagattcatgtatactttattgtttcttcattaattgaccaaatgttttgatggtgcctctaaataagtagtacttaggcaaatctccactcatagtattgtggtaaaagattaacttttgaaaactgcccagagaacagctttctatcacattaatcatgagatacagttttgttttttccaatgttctggcggccattctcatgaggatggactgtgctgactgatctcagtgaaagttaccagtgggcatgttctcggggcctctctgtccccatgaagcatccccactcagagacatggaaaacctgtgagatgagctcatacaaatgatttctgggatgaaaatagcaatgtgagatagtgccaggaacttcaggttcacagagtataattaagatttttcctgaatcattgcacactgtaatttcatcacatcattatgtacgttctttaattatgggctctaattgcccattttagttctgtaattagacataaagacattaattttgtaggtataacaatcagctcaaatgtacttccaaattctttcccctacctttcaagaaaaattaatacatcattaaaaagtttgtgcacagaagagcctcttagagggcagcttttgggagccagttggtgttctcaaaggtggggccccagttcagaaagggtatgggaacatcaccctcttatattccccataaactgtgttgcttcatgtcagatagaccctactgggtccagggcagggaagagctccattaattcacatagggccgatttctcttaatcgtaaaattttaaggtgacatcaatgcttaatgagtcatgggagaggaatgaactaatgttagggcaactctggctttttatttctcttgtgtcctattaaaagatgagaagatgaagcattttaggctcatggggtttgtatttttcatttgtgcatgggtagctgattatcatctgtcattatgtgcgtgtgtgtgtgtgtatgtgtgtgtgtgtgagagagagagagagagagagagagagagagagagagacagcaagagagagccagaatctgttttttaagaactctcaatgattcagatctccattttttcccttcacctacagcactttagttaaaacaaaacaaaacaaaacaaaacaaaaaaaccgacgagttccagcatttccccccatggaccatgctatgtccatttcagccgacacattttacatgtgtatctatttgcctccacttacaaatccaaggaaaaaaaggcagtgtggtagagtagaaagagccttagtaagggtcctggcccctttttcttccctttttacacatactctctctctaggtaatctctctattctcgtccttaaaggccgtttatatgcttttgtccctccaatttatatctctagctcaggcctcatctctgagctccagattagataacaatcagaatgcttatttctacttggatgatttacagataatttaagcttgctgtgttcaaagctgggtttactttcctccaaatgtattgcttttctattcttcccaaactcaataaatggcaaaaccatccattcaagtactcaagctgagtcatccttgattattctttcgacatatgagccatcagcaaggcttgtttcaccctccagaacctatcttcaatctgtctgtttccctctccctcaattcaggctgcaatcccaatgcagagtgttcagtaaagcaaaaggggtggtctgctctcaccaaaagcaatttgcgtgctcttaattcacggatggattacctagcacttaacacagacccagatatatttggtactcagtaatatacactgaagaatgaatgagtgagttaatgaattaatgaatgaataacagaaactctacctcctaggacttaataatacacagcaggattaacctgctttcataagtaatcagtgaacctggtaaagtgtgacatttatcttttggtgaaagcagctcaccccttttgctttaccgtttcaccagcaatctctgttttatttttacctgttcttttggacacacaatttagtcagaaatttgcacctgagtcttacttctgccacctgctagtataaagatcaactggtgcagagcactatacagagattatttattgtttgctacaatgttggatatagagtttcctctctaggacctctttaactgggagggataaaaatggcacaactaaattttcatgatttggataagaagagaaacattgggtgggcatggtggctcatgcctgtaatcccagcactttgaggggctgaggcgggtggatcacctgaggtcaggaatttgagaccagcctggccaacatagggaaaccctgtctctactaaaagtacaaaaaaaaactagccgggcatggtggtgggcaccggtaatttcaactactagggagcctgaggcaggagaatgcttggactcgggaggtggaggttgcagtgagtcaagatcacgctattgcattccagcctggccaacaagagtgaaactccatctcaaaaaaaaaaagtagaggagaaacattgcttcattcagaaagtgcttcctaagagattcccatggtccagggatgatgctggatggtggagatgtagaataatgtagagattacagggtagcggggatggggatgcacttgtaagccaatgagtagaagaaaggggttctggcggtggcacagcagcaaccacaggacgaaagcaactgcagaggacatgtgctcaattctgtgaggggacgatggcgggacatggaagggtcctgatcatgtcgatgttgatggcaagtctaccagtcaaaaggaacaggtgagcaagggcctgtagcctggaggtggcttggggctttcaaggaaccactttgttagacctgctaaagcatgtgtttcaaagagaatgtacccagctcgaagacttgcacattgtaggcacttagctaatatctgtttaataaatggataagtgaatataagtggcagaaagacagctgagttgctgggacaggtgagatcatggaaggccttgtgtatcatgctaggatcagtaatgggaagtagagaagtggtcaatgaagttttatttaagcagaaaagagaccctattgggttgagttttagaaaaacccctgtggctgcagaaaagaggatggtttggtgggaatgagactgaagtcatgagcacagacaggaagggtaactgaacattttgagagagctgaaagtgtagacaggaagggtgttcaaagattgttggagttcagagagaagtcctcggcctggcctagcagtgtagacagccaaagacagacaagtagtggaatgtcacattctagtaactgattgaaatgtgtgtgtgtttataggcaagtgagttgaaaactgtgtgtgtgcttaagttggaatgtacatgtgcatatatgaaggtgatttgaagtgtgtgtgtgtgtgaatgcagtgtgtggtagtgcattggaacgtgtgtgtgtttacatgagtgcaagtggacagtaagaatggtgtctaacacttacctatttggtctaaaggctcataaaacttctgccttactcctggtcacatgctccaagtcacaagcagaaatgggcagaacagctcggccttgtaattccagcctgactcacactaagctgtttccaaccaagtgaattaatttctccctccttatgcccacacagcactttcctctacaacaattgttacaccactgttgttattagtttatataatactttaccccctgctaggctgtgaaatcctgaaggaggagaaaatatgttatgtatcatttatctccagagtctagctcattcaggcacatgctaagttctcagctaatgtctgttgaacgaactaaaagaataggcacacttttatagcttattaagctcaaacatagactccaaagcaaaatctcatcattgcctcttgcacattttggaaacaacagcaataatagttaccatttcttgagaacctactgtgtgcaaggcacagtgccaaatactttgggggagccagtgattttatgtgcaatgtttttaaaagtccctggagttaaaaaattcctaggaggtaaatattatccaccccttccacagatgacggaagtgaggctcactaaggataagtaacctgccaagttgcacagctagaaagtagagagctgaaacaggaactcaaagcctgggctccgaacaagcacgccctgcagacttcccttccctgtgatgccccatgctcagttttctattttctttatagtggaaaagtcaatgcccttcctatgagaaataaaagggtttaaagtggtcaaaaggaaacagtgtttcctctgtgctcacggggttttggccaatcacagagggtgaaccaaaaacaatattatgcgagatgtggccagtttgggttgattccagctttggatgctgtgagctggatcccaggagcacacgaggaaaaacgataatagcatacttgagatccaagcccatgttggggtgaggatagaagttttgctttcctcaaactattgcatttttcttttcctccctaagggtccgggcaggatgcttcctaccccagggggccacttccaaatgctgctctgtcacttggtggaaaacttcaaatttactgagggtttactgtggaagacttagtcaagagggcaagtaccctatatctccagattgctttgcacatgttggcattcaattaatattttatttgtcaatggatttaatagctgattacagtttgcaatgctctactcatggataaatcagttgatcttctcaggcttcttatgccttttcccagtggatttttcattgtcgtggataaccccaggaaaaagaggaggcacagaggaacctctcttacatgaataggtggggggatgcaagggaggacttctagcttttcttctcctgacttttctacattccccaggttgagtgactcgtctccatcttttaatttagcatcttggaactgaacagcacctcccaagcaaccctcacctgggaaccaggcagaaacaagtgaaaatgtggaggaggtgtttatgaatttttgggcagtcagtgatttcagggatccaggaagttattctactttctaaaccacttccccacctgctggatatgaatgtaactccctcagctttcagctttcacatctactttatatacaattctatactgcctctcccattttatattatttatacctatgtgctgggacttgagcaaaggtttttttattttttatttttttttattttttaaactttgtacaagggaagccataaagaatttgggcaacttgtagggaagagggagagtgaatttggtgaaaccgaaagtcagtaaaggtcacatgggagatgctgagctctgcagacagatctttcaacgtgaagcagcagtgaagaacatggctctggagtcaaactggctgagctaaagagttgactttgttacctactagttacctattggtagttacctactagttatctactagttacctacctctgttacctactagtgtgaccttgggcaggttaagtaacttctttgaacttagtttactgatacataaattagtgataataataattcctgtctcataaagttaccgtgaagattaagtgaggcaatgtatgtggagtgttaaaacagtgcatgacgcagagtaaacacgttaaaatgagctgttattaatatttggttgctaaaggtctgtcctacctgatgtgtctatctctttcaaatacatcctctgggatttagcactagaaacagtcttgcagaaagttagagcagggaggaaccctcaagatcatctaatccaaagtcctcttttgtaaatgaggaatcactggcccaaggtcacggagtaagtcactgagtaatccctctggtctgttgcccagaatgcattccttcccacaaatctggccatgcttgtcctggagggcagatagactagccttccccaggtaaccttgtatcttcccgtaaaaccgtctgtcctcacaaagtggcacaatttctaaggctccctcgggcaacaaagtaggttgtgttcagagaccagtgaggtggagaaactgcccagccactgaactccaggctggacttggtgagtggcactcagtggagtcagagtcctggagacctgcacatcagggagagggtcctgaagaggtcttgaaataatttgacatggaaagagaaaatacaaattttcagagacacagataagcatcatatttttaagccaagaactcagttatatttttgacagtgtggtgtctacagtactaaggcatgttcttacaagagtgacactcactagctcttttttttttttaactttcattttagtttcagtggtatctgtgcaggtttgtcatatagtaatggggatttggtgtacaggtaattttgtcacctgggtaataagcacagtacccaataggttttttttttctgattctctccctcctcccactgaccatcctcaagtaggccccagagtctgttgttccactcctagcatccgtgtgttttccttgtttagctcctacttgtaagtgagaacatgcgatatttggttttctgttcctgtgttaatttgcttaggataatgagatcatgttctctgacatggaaagagaaacacacaaattttcagagacacagatgaccatcatatttttaagtcaagaactcagttatatttttgacagtatggagcctccagctccatccatgttgctgcaaaggacatgatctcattcttttttatggctgcatagtattccatggtgtgtatgtactatgttttctttattcagtctaccattaatgggcatttagtttgattccatgtctttgctattgtggatagtgctgcaatgaacatgtgtctttatggtagaacaatttatagccctttgggtatatacccaataataagattgctgggtcaaatggtaattctccttttagttctttgaggaatcaccacactgccttccacaatcgctgaactaatttgcactcccaccagcagattatgtgttttttttcaaccttgccaacatctgttttgttttgttttttaataatagctattctgatgagtatgagatggtatcttattatggttttgatttgcagtgctctaatgattagtgatgtcaagtatttttttcgtatgcctgttggccgcatgtacgtctttttttgaaaatgtctgttcatgttctttgcccactttttaatggggttgtttggtttttccttgtaaatttgttcaagttccttatagattctggacattaagtctttgtctgttgttcccctcctagtttgcaaatattttctcccattctgtaggttatttactgttaatagtatcttttgctgtgcaaaatctttttaattagttctcattggtaaatttctgtttttgttgcaattgcttttggtgtcttcatcacgaaatctttgccaagtcctatgtccagaatggtatttcctaggttatcttccaaagtttctatggttttaggttttacatttaagtctttaatccatcttgagttgattttcgtatgtggtatataagataggggtccagtttcaatcttctgcatatggctagccagctatctcaatatcatttattgaatggagagtccttttcctagtgcttggttttgttgattttgttgaagatcagatggttgtaagtatgcagcattatttctgggctctctattcaattacattggtctatatgtctgtttctgtatcagcaccatgctgttttggttactacagccctgcagtatactttgaagttaagtcgagtaacatgatacctcctggtttgttcagctcatttctttcttgttgaagacttcagttcaatggccttagtcatctttggaatggcatttaggattcagttcaatgaccttagtcatctttagaatggcatttaggaaaatggactcctttaccaaaaaggtgaaaaagaaaataatataacccaaccttaaagactatttttttaaggggagagggagaggactttattcataatcctatcagctgaacacattccagtcttcttctataaaaacacaattttttataaagttgaaattatggagctaagacatttctaagaagacttaatttcagttagggacttgctgattatctttgggtaagtcagtctggcttcttttctgggaggagtgttgtgtccttagagacgtgaacatcgacgtctgcttgtttttgtgaggaagcatggtagaatgaagagaacgctgtctggagccaaaagatccagattgaaaccagactttaagcctgggctctgcttccccttttgctggatgaccttgagacagtgtcttaaccttcctggatctgttttttagcttttataaaatagatcactggcatatcagcttgttaacgtgcactgtactcagccttgacacacgggagaaaggttttcagggacagggtgaagatttcatctatatgacctttgactgcagtttggttggttgggttacacaatctacaattgtagattgattgagagtcttttgaaatatgtttttctttatgctagttacccaggtcctctcctctctggtgacagtggtaatttaccagggcattgtgtcctcttttcattaattaggccactcaggcctacccgaatcccaagagaccatttatggatgatgaaggtggtaagatagggttgtagtatgttggacctgctgtcacaaactaccatatgcagggtgacttataattaagagaaatttatttttcacaattctggaggccgggaaatcctagatcaaagtgccagcagatttggtgtctggttaggcctgcttgctggttcagagataactgtcttcttgctgtgttgtcacatggcagaagggggaagagaactctctggggtccttagtataagggtactagtcttatccacaagggctctgtcctcatgatctaatcaccccacaaaggcttcaactccaaatgccatgactttgggggtcagatttaaacataggaattttaaggggacacaaacattcagtttatagcagagagtgtatgttcacagcacaggaaggttcacagctgaagcgagccattaattgtgtatagactttcatgtctctgctctgattcattgtataatctgcttcattcaaaggaagaaggtaaattttgggtccctcttggaacatttaggtgactcccaccaaatacaggatagctttgagttataacgtcatgaagtccctggtcatgtctgtgtgtttgctttggaccagacccaagggcctgtcctgtgtcctgcccgggctcctcccacctctttcctggagaaacccacagtgagagtggagggtgggggtccatgtttatcttggtgggcctcactggagctggacactgctgctctgtttgcccaggcttaagtatgcatctccttttttaactggccagggactttcccccagtcacttggcctgccattgatttgggacttttctgcctaaaacttctaggatgataaggagagcactattacccactgcctgcccaaacctagtagcaacagcagctagtcatgaccagcattcatggctgcaagtactgtcaggccaggggcctgaccagtgaactggaactttacttctctcccaagtgggattagagttcactgagtaggtggccctattaaaatatgtatagcctgtgctaaagttaattctaggggtgagaatgaggcagctctgcttgctggctagcccaggctggcaaagaataatgggtgcaagcaagaataccagagccagattgggttcaaattccaattctattgcttcctaggtatactgacttaggcaagtacttctatttctctgtgtctcagtttcttcacttgtgaaattttcatattttaaggattttgaagatatcattttgaggcttaaaacaatgtatttacttatgtttaacacatgtaattactgatgtttaacttttttggacttataaaaatgacaatgtttagcagagtgctttaaaaacatgacccaactatgtgctttctataagaagcccctttgaatataatgatatagccatgttcaaagaaaaaggatgaagaaagctatattatataaacattaattgaatgaaagcaggagtagctatattaatacatgtgaaaatcctctacaagatattagcaaattgaatacaaccatgtacaaaaagaattacacatcatatcaaattagatttattctaagtatgcaagactggttcaatattttaaaatcatgtgattatattaattgatgcagaaaattatttgacaaaattcaatattcattcatgacttaaaaaaaactctcggcaagttaggaatagaataattacctcaattaaaaagtttacagctaacatcatactttgtgaagaaggacttaatgttttctccctaagacagggatcaaggcaagaatatctgctcctgccactcctattcaacatagcactggaaattctagccattacagaaaagaaattaaaggcatacagattggaaaggaggaaataaaactatatttgaagatgacatgattgcctacagaaaaaaataccaacacatttacaaaaaactctcctagaactaataaattctcctagaactaataagagaccacagaatacaggctcaacaagctcaccggatacaaaaatcaattgtacgtctacatacctatattgaacatgctgacaccagaataagaaatatagtgctaattttaatcactcaaaaataataagtgtaagtacatttaaatatattatatttgtaatgtatattatgtaagtttaaatataataaaacatacataggacttgtatgttgaaggctacaaagactgatgaaagaaataaaaagatctaaataaacagagagacatactatgttcatggaagtacttgacatagtaaagacacaatatactaaagatggcaattctccccaaatcaatatatacatttaatataattcctacccaaatctcagcaacgttgttttttttaaaatagatagaaagaggattattctaaaattttgactaaaggctgaggaaccataatagctagaacaatttttaaaacaaactaagtgggaggaatcagtctaccctatttgaagacttattatatagctgtagtaatcaaggctgtgtggtattgacagaagtacagacatagatcaaaggaatgcaataaagaattcagaaatagacccacacaaatacacctctgtgttgccttatttttcagaaaagctctagactcagagtcaggaagcccaggtttaggtccttggccttgcacaagtgagttcttccagttataaaactttgattttctgggtctaaatcacttaaacttttctatctcagttttcttttctgtttaagggaacatccttccttcttccttccaagcctctatttgacaaggatgataaaatatctttcttttttaagcataaggaattctacaaaccaaaagaattattacattggttgatgtgaataacacatctcaacaccatgaggccctgactccgcaaacctgaagtcaaatgccaagaactttcatgaaatttattaatttattttttcttcccaactaacaccactaattctttatttggactccttaaggagcatgaagaatgggactcattcttgcagaactgtttttagagtttgctactgctcaaagctcagagtttggccatgtgaacttctgagaagtctgtgaataagagattttacagcaatttaacagtggttcaaagatagatgctctgtctcccagtagaatacttgtgcttgtgtgggcagaaaattcttaaaatgattcaaaccaaccacccaaagaggattatatgtaaattcatattgtgtgggtcctgggagctttgaaaaccacatacacagagcacagaaacacacaaacacacccaccaacacacacacacacacacacacacacacacacacacacacacatacatgaatagcacccttagcaccattgctaccttatgtgattcctaccatgaaaatctgcactttaaaaagcaggaaaatttgaaatctacagatgtggataacactcaaacttgaattgggacacaagaacttttccctctcaggctagtgagatagtatggcctagtggctacaagggtgaattctggagataaattttctgggtttaaatcacaattttacctttcattaactgtgatttggggcatgttttttaactattgggtgccttggtttgctcttcagtatgattggaataattatatacaaaatatacaatatctatctcacagtattgctgtgaggatttgaagaaatcatttatactaagcttttatgcatgaaatatatttagaacagagtgaagcagaagtatctgtgttctttcatagaatgtatgaatgaaatgggacagtgggtggtcactgccttaaaatactataccatatattttgtcatggtgctattgcaacaatactcctaacattatgtatttctttatttgagtcactgaaatacaaatatgttctgagaagagtcagcagagtgatttacaaactagctttttagactgggaggcacactggagatccaggttgggggcctgggtctaatctcagggctctacttttttaacaaggtatataattgtggacaagtcaactggtgttcctgaacctcattcttacctgcacactgaggaggctgaactgggtgatctcggaggtcctttctggctgtaatatcctaagagactggatgctccctaggcaaggaaactgttttatcgacgtacatactgtggaagcttactaatgcaagtctttattaagtagtttttctgtagcagccgcttttctaagccctttgacctatttaacccttgcagcaatcctatgaagaaggatttatcattatccccattttacagataaggaaactgaagcagacagaggctaagtgatttgcccaaagaccatatggctattaagtggcagggctgagattcataatccagtaagttgaggtacgcacaccaggcattctattcagcatcagacagtgctaggcaaagaataaccgaagaagagggactgtgttctattcactttgttttccccacagatctgtaagagtgcctggagctttttataggttctgaatagatatttatcattcttgcagtggcttgatcttggctcactgcaacctccgcctcttgggttcaagcgattctcctactttatcctctggagtagctgggattacaggtgcccggcaccatgcccagctaatttttgtatttttttttttaaattttattttaagttctgggatacatgtgcagaacgtgcaggtttgttgcataggcatgcatgtgccatagcggtttgctgcacttatcaacccaccatctaggttttaagccctgcatgcattaggtatttgtcctaatgctctccttccccttgccccccaccccgtgacaggccctggtgtgtgatatcccactccctgtgtccatgtgtcctcattgttcaactcccacttatgagtgagaatatgcggtgtttggttttgtgttcctgtgttagtttgctgagaatgatggcttccagcttcatccatgcccctgcaaaggatatgaactcattgttttttatggctgcgtagtattccatggtatatatgtgccacattttctttatccagtctatcattgatggacatttgggttgattccaagtttttgctattgtaaatagtgctgcagtaaacatacgtgtgcatgtgcctttatagtagaatgatttataatcctttcggtatatacccagtaatgggaattttttgtatttttagtagaaatggggttttgccatattggccaggctggtcttgaactcctaacctcaggttatctgcccgccttggcctcccaaagtactgggattacaggcatgagccaccacgcctggcctatcattcttgtttttgttgacgacaaaaagttgttggattaaattgctttcagccttctgggttgctaagtgttgcagagttggctgtgttaaatttcattttcttttgttaatgttacccacacaaggtgaaggttttggttggggctcaggagggctcctgactggggagaaagtgggaagatccagagcaaggagaagacaatgaggctgccaggctttgggctgctctggcctctctgctgcctgccactgtcttcatgtccagcctcgctgtgtttctataaaggtggagttgtacctctctgatttcccctaaaggtggcctggatgtggtagaagaaagaggaggcaaggcattacctgcacctggaatactgatgagtggtttgctctttcttgtatgcccagtggcctggtcttaagcctaggaataaatgtagtcaccatggccataaaacggccccactgctgggcttgctttccctggcctctgtgagttccatgctcattatatggactccccatagcaacgttgagagcttgcttatcatttccagaagtgaccatggcagattaggaatatatgtttattttgaagtgggtttttttctttttaaattttacacattgttggatgaacataacatcaagggctgctttcccaactgtcttaggaaaagagctctaatgttggagccagtagccctgcgtgttctcatcccagttttgattataactgactataatactgtaatgacactctgacctgtgttcttttatgactgagatttccggtggggatggaggaggtgtctgatgtacagaaccagggggatgctgcctgagccaggttggggacggagagaagaggctgaatttcaagacactgacatcatcagtactggccctagtgcagttacatacctggtcctgcaacaaataatgagtatttagggcacatatgccaagcattaatggggtcacgaggtggatcgttcttttgggtgcccttttatatgccgctgcaatcagagaagcaggacaccatgtaggtgagcatctgctgttttcacagctatttgaagctgcaacccagtgtactaaaagtttccaggctgactcagtccaaaggtgactgttttggaaactttgaatgagattggttcggcaacttcagtgttatgtaagtaaaaggatgagagcagttgaaagagccactgctctggacatgttctaagtggcttctaccaatgggaatacgtgagcgtgcattaagaatgtagcaagtgagactgacatgtctccagtacaagcacagcacgtacaaggacacaacttcatgtttggttcaatgtgagacttctctgtggctcctttctcttcatttgcacagatatctgtaccacccagtataagtggtatactaatcgtagctagcctgtgctgcatgcctgctattttctgggtaattcccatgtgttttacacaggttaactctacttcctctcatggaaactacttgttgtcgaaataatggttatattttaccaatatggcaactgaggcacagagatgttaagtgtttcagcccaggtaaataagtggttcaatcaggatttgaactcaagcagcacctaccttggagcctaagctcttaaccacagcacttcactgaacctataaaatacatgtttattggttttaagctctgctagttgaagaacatttatacatgtctctattaaaaattcacttgtgtgtgggttatgaattcacccataaagaagactgccatgacgcacggaggaggggtgtctgtggagcttcaggagacgtgataatccacaaactgtcctgggttgaacttagctattattctgccaggaaactgtctggagaaggtccaggaaagtaccaagaagtaaagaagtacctgagagtgctcagctcccagtgtgtcccttggcatctgccagtcacagcttggttggttctggctgtggggccggccttcctgagacccttgtcagggggctcataccctggtgctctgttttcactgatgatgaagcctcagagcccttggtcccctcatgatgttctgcgggaaaattgtgcacacttttgttgtgtgacttaggttctttaactcaggctggttgacatggagcttggttccagtgatcagtgctggctttagatatgatttgcgcatctctgcaggctagtgtcacgctgcactgtggatctggactgtggctcgggtgccagttgcaacatagtcttcaaggatagccaatggcgagacaacagcactctgtcatgcagctgaagttatggaaacacatgatgtcacatgaatgtctattgtgtgaggtgatggttaatacctgtgtttccaagaaagtgccaggtactggctagtcctcaccacaaccctatatgtggtaagggcagttattaagcttattttataactgaagaagcattagcaccaacagagaagataacttgcccaaggtcatacatgaaaaccaatggagaaattaaggtttcaacctaggcagttaaggcctaaagtctgtgctcgtgaccaccaagctatctcaccggtcccctgtcaggctttttaggggataaagtacagagtaaagtagaactttcctcaaagactgtcttattggtctcacttatttttttttttgttagtctttgggtttactttaaattgatgggctgctggaaaaaatgtaaattgtcatttaaaaagaaggcatcaaggttttgtcttaggttaatttttcaaagggcttaccaagaacacagaagacagaatgccagctgggtgccgtggctcacgcctgtaatcccagcactttgggaggccaaggcaggcagatcacttgaggccaggagtttgagaccagcctggccaacatggtgaaaccccatctctactaaaaaaaaaaaaaaaaaaaaaaaaaaaaaaaaaaaaaaatagccaggtgtggtggtgcatgcctgtaaccctagctgcttgggaggctgagttgggaggatcccttgaacctgggaggcagagattgcagtaagctgagatcatgacactgcactatagcctgggtgacaaggcaagacaatgtcaaaaaaaaaaaaaaagacagaatgctgagcaattaagaactactttatttagtcctgtcttatcatttgtggcctttgtgtattgagcacgtcctgagagctgggcactttctaaatactttacatgtgtttcctcactttatgcttgtaactgctttctggaagcaggactgtgattattcccattttatggaagaaggaaatgaggttcacgaatattacataatctgctcatagtcacaaagctagcaggtggtggggctggcgtagaaacccaggcagtctggctccagagtccatgttcttaattaaccactcctctagggtggaaagctcactggttttggggttaggacactcatgccagctctgccaaaatgtcaacatgtgtgacactggccaagtcatatctcctcttgggttctcattcatttatttactgattcattcagcagctctttccagcatacctaccatgtgctaggcattgttagtactagatacataacgggtgataagatagatttcctcgatgcttctgtagagtttacagatggattttcagtttcctcatctgtaaaagatgagaattaaaatatatgaatgtttctcatcctttacaaaacccacacatctttttataaacataaaaagttatgccttccctaatgttatttgaaatttctgagtaaataaccatgactaaaaataaattaaagcaattataatagtgagtaatttttgtttgaatcacacaagccctcatgcctgttcctgaggagattctcctgcgctggccctctgagccctgggcattctttcggttaagaatcatgggaatagtattcttgctctaaaaacggacctacagttatattttttaattgctttgaaatgctggagttgtgtctatttaatttgtattcattctttcaccaagttttggctcttgggtttgtatggcagataaaactttactcattccttttactgaaaacctctttcccccccagggtatagtcgtgagtcacgagctctctcaccaactgacatttccccatcctgtttttggagggaacaacaaaggacatgcctggtgcctgacacagcgggcccacaggctgctcctttagtggccttgtgagttcgatgagcttttggctctaggaagtgcctgggctgctattactctgtgaatctcatgagagtcacagacctcttaggagcaccagccaggttgtaaagatctcttgaggactgggctctggaaggactggccactccaacaccctgccttgcccttaattgtgcattgcctggtgttctttaattgcctcacaaatgcccttgaaaactctcagggatggcctcactgtgcatgacaaaggaatgcaacctactgtctggttgtactgaaggagcagagagcaggattctcataatgattgttcaaagaatttatttatgtggagtcctaaaaggagtgataggtgtgaaaaaatgcaatttaattcaacaaacattgatgcaaacgctgtgcttggtgacagcaatatagagatgaataagaccagtgtctagtgacgtgctggcaagtacaactggctctgtggggaggcggtaccctgatttgtaccttttgctgatttccattgagtaaatactcttgccatgtttgatttcaagctaccaacatggtgtcaattggctcacagaagccctgaaaatttaataatcagctcttatgagcctgtacaaactgaacttgcattctgctaccaatatctacttttgaagttttcagtttagattggaagatacataaattgccatgcagtctggtaaagacagaaatagaagtatgtagaaggtagaaaggtatcacaagggacactggttcaattctgcggtgggcatatccacatggtaggctgcaaacaaagacaggcaaggcctgtaggtgggtggagacagagaccttcagagcatcctcagtgccttcaggtcatggggaaatgccttggcctgccttaaggtcccgtgcagtctagcctcaccttacctggctgaacattctcccacatttactgacacaaaccttctgctctagtgagtccagcccagtgttttcagtcttgagagcacatccctgccttggctgacacccacctcctcccaccaccgtttagaaagtgccttccctccacctccacttccctgctctactcatccttctttatgaatgcttcctacaacagctccaagccacagaaagcactgacagaaagggaaagattgatcacgtgaattccattaaagtgaagaatttatgtttatcaaaagtcactgttaagaaaggaaaaggcaaacaatggagtcagaggaactgtttggaacacttatgaccaatcgaggatttgtattcaggacatgtaaggacctctcacaaatcaataagaaaaagacaagaaaagggaaaagagaccagaacaggaacttcacaagaatggatatccaaatgacatgaaaagaagcttgccttcactccacctttacctcagtcactagggaaatgtgatgccactacatacccactaaagtggctgaaaccaaatagacttgtattaccaagcattgttgaagacttgaaagagtgggaaataatgtatactgctggtaagaatcagacatggtataacctatttgaaaaacagtttggcaatatttattaaaatggaacatttgcatactctatgacccagcatataatctgaccatactctatgacccagcatatgatatgacctagctataatccaatgaaaatgtatatccatatgtttacctaaaagtatgtactggaatgttgatacagcatcattagttatggctccaaattggaaatacccagacattcatcaatagtaaaaaataaattataggctatttgtgaagtggaatctttttaaactatgaaaaagcatgacatactgctccatagaactacatggatgaacctcacaaacctaattttgagcgaaaggggccaaacaaaaaagaaaacaaatggagttattatatttatataaagttcaaaaacagacaaaactatatgaggttagacatcagtttacctgatacctttggggaagagcaagaggttagtgactgggagggctgtgttgggggcttctgagttgctgaggttgttatatttctggccctgagtggtgataacacaggtatgttcactttgtcattgagctttacgtgtgcaatttgtgtacttttctgtatatcttacatttttattagctaaaaagcaaaggagcttctgcatgaaagtattagaactagtgctggaaagtgagggagtgtttctgaaccgcctttgtgtttttcttttgacgttttctatctttatgagtttattcatcaaacaaagacattttgagagtgacaatgtgccgggaactattttaggtactgagagtgaaacaaaatagaaacaactgctgctttcatggagcttacattctcaaggggacagcaaggtccttgaacagacaaatgtataacaagtcaggggataagaaatactctgaagtggtattaggggataagaggataaagaataatggagctgggctgagggtttgggcactgactaggtgttgttttatatggggtggtcgaagaggacctctgaccaggcagccttggagccagagcctggatgaagtgagtaagggaggctgacaggtatgtgaagaacattccaggcagagagggcagtaagcgcaaaggccctgcattgggatccttggcctccgaagcaggaaactcagcatcattcttggcttctctctctcttcttcaccttcatatttgaatcaaatcatgatccatttgatttcatagctaaatctctcatagtttgcaacctctgcctcccaggctcaagcgcttcttctgcctcagcctctcgagtagctgggattacaggaacatgccagcacacccagctaatttttgtatttttagtagagatggggtttcaccatgttggccagggtggtctcaaactcctggtttgtctccatcccctccattgttgcctatttgggtaatagtttcttaactctgccttcccgtttccatttttttctcttctgattttaagtcactgactggatatgccactcctctgcctaaaagccctccagtggctctgctttgctctcagagtaaatgccctacaaggttttggttttcctcactggtctcatatctttctgctttgccgtacactccgtgcttgagccacaccaaggcgattccatgtttcccacattccctctgaggaaaggccctttagtctctgggtctttctttatgagggtgcatctacctgtggagttctttcccccacctcctcattttatgttttgcacatcccttagatctcagcttagatgttgtttagtctgggaagctgttcctgtcccttaaaccttggccaagtccctgtgttctcctatcgttgccccgtcatatcattttgtcattgatttttcttttttccagcctcccatgaaactctaagacacatgtgggaagtaactatgttacttattcatagtgcttagcaaagtttctgatgtttagaaatttctcaataaatattaaaaaaagaatgcatgttgagctacatttctgtgatatgtcaaaaatctagaagtatttttattagtaactgatagaaatatctttcagtcaaaacattattcatcaactcacaaaaaagcagactagctttgtgtttgagttttgtttttgtttttcctggtaattttgtgttccataatttctcagacacagaaacattatctttcaaattttaataccactttatttgactcaatcacatgtaaaatttttgttcagagaattttgaatgtatccgtgaaaaatattcaaatgtcgaaatccaaatgtcttgctttggctgtggagcaatatcattactgtgacttagttctagaatttagacttaattgctaaaaaaaaaattttgaattcaactttattaattttgtcaagtttttgatgtgctaggtggacattctttccaatttattacagtcccttcatatagacacaaaagcttttaacacgatgggaaagctggtgagacaagtcagaaaataaagcagctcttttttctttttttgttgagacagagactagttctgttgcccaggctagagtacagtggtgcgatcttggctcactgtagcctccacctcccaggttcaagcaattcttgtgtctcaggcaccgaagtagctgggattacaggcagtagccaccacgccggctaatttttgtatttttagtagagatggggtttcaccatgttggccaggctggtctcaaacttctgagctcaagttatccacctgcctcggcctcccaaagtgctgggattacaggcatgagccaccgtccccagccagaaagccgtgatttttaagctgatgctttgtaccatcagtgtgaggagtgatgctattgatccctgctgggcatgagcattagaagaaagttgagcagggacttaaaatggggatgtggagcactgtgccaatgtctttcaaatgggcttttaaaaattattttaacaggattatttggagaatcataaatgtttgagcctcagatacactcatagctaccatttactgagtacttgctatatgccaggcactataaaaactgctttaaatagacaatcttgtttaattgtaataacagtcatatgggattgttaccatcattcccatttaacagatgagaaaattaaggctcagagaggttgagtggtttgccctaggtcatatagcaggtcaaagctaatgctgaactatgaacacagttcctctgactgaaaatgtgcaaggctactaacgactaggtcctactggcttatgtattgaaaagtagatcaatgaactcattctggagctaaatgttgtctattactgtggattatccatgacataacccactcattatattccagtattggttaaaaggtaggagagaagtgatagtaaatttcatgggttcggcatatcttctgaccgacagaagacatggaaatgttttaaatgtttcttttcctttttttttttttttaaaaaaaaaacaaaaacaaataacactaaaagtttcaccaaacaagggttcataaaaggatcgtctctaaattgtgagtgtggtgagtgtgcatgctctgagcaaaaagagcctcccctttctgagggaattgtgaccctggaaaggaggagagcaggaacagctggccatctccccctgaaaggccagggcccccctctcaggcctctgggctccagctctggctgagggtgtgtttgtttggctgtgactctttcccttctgtttccctctcggtgtcatatttcatgagctccaggctcctgcctgtttcagcttgagcctctggctttcatcgctgcctccttggccaaagctgagtgagggcttgaaaaaaacactgattggatgcacatttagtggaggcgattgctggaccagcacctcaccaatccccagccccaaatgcaactgacagctacaccctcctggctggagcctaaaccagaggcccctttcctccctcctctccacccatacccttgctgtttgcccaactcttcctgctgaaatcagaggcagcttgtgcctcccagccttcttccctgcccccgctgtctgcccagccaccagcttcccctgggctggaaagacccccgcttgtctgactgtgctaatcctctgtttgaggttccagaacttcccaattgttgggcctgggttcctgtacttagctgcccagagtccacttctctgctgagatttctattatacaagagattcaaccagaaccctctccgtgggcctccatgcctctttttgctgaattccccattctcattctgcgtagggggtgggagttggtgggggtacatgcaccttgagtctaatcatgatcttactggggagagctcagtaggaaagtaataacatattcatttaaacaactttttctctgttaatctttttattgaacttcatagaattaatggataaagactattggttagagtgcgtctttcttagacgagatggagttagagacacttaaaaaaaaataaggcttgccactgcaggagtgcacagagcacctcaactattggagcccaggtgatctcttcagtgggtcataaaatctgagtcataagaacctcatggcaaagaaaacttgaaactgcaaagtctcacatagtcatttgctgaaaactgaagtgtcccaacaaatgtcgggttagacctactttgagaaacacattccaatatgagatcgaacctgacaattttgcatgctaacctggactgtttcttattagagcaaaggggatgggctttttgtttgctttgggtatatttgtttttgctgccaaagtgttgtaatgtcatgattatttaatatgtatgaggcctagttgtgtactagggagagtcaaaatacatttactacgaaatgagaccagctccagttgtttaaacagctccagttgtaataataagagctaagacttgatgccaagcactgtttctaggtattaacttattgagtcctcatgattactcctcacgatggtcctcttggaaaggatcctatttttctatgagaaaactgaggcttgagtgttaaggaacttgcttaaactcacacagttagtaaaggtcagcttttagatttaaagccaggcaccctcattctagagcttgtggctcaaccactgagctatactgcttgttagggttgttggtggagtgatagtagaagtagatgggctagagtttttcatttctaaccctaaaaatctatagctattaacactgaagacagcaactgccaattaaataaatcctcaacaagactgagaagagaatctgctaatctgttggtcactaatgtctgcagtttatctgcttatctatctgcagcaaaactgtcttagaacactttgctgaatgaaattgaacatggaaagctgactgaagggaaaacagagaaggtgggatagttgagaagggagtaagatcagacaaattgcaatgctctgtgggatactgcgtccaagcagaacagtcaagggattcagttctcagaagctgttcaggtagacgccctccttaccagagtcggttagcctcttgctgtatgcacacttgaggctgctcaaagcgcgagggaggcatggtctgtgctcattccaggcatccaaagcaccagggaggcatgatctgtgttcattccaggtgtcttatctcgctgccacttccaggcctgcacattataggcaatatatttactacactctcccttctcctttattttttacttctggatgtgccatggtgaatatttttcaggcaaatcgggggaatcgtttccatttcaagctgggttgaaatctagcactatgattagggttgtgctaacctctgcctgcctctcccctaactcctgctgtgtataggtgggcatggctcaagcatcctcagggctgggagaaggttgcatcaggaatgtttctaccaacagaagctggccagtgggaggcttgtaggcactttgtaatttaccattctcttcttgaactatgcagcagtctgaggggctgtacagaggattcttcccagtcattcccattgctagctttggaggccttctcccacaattcatagcctcctagtaatgtgctttattcctaaagcccagtccttggggtttttgaagaaaaggaaggcagatcagcatgccttccctagtctgaaattaccctgtttgactcatatagtgtggagctttataatctgtaatccaaaattgggattgtctatactataaggatattctctgggacttacgcttatttaaccaaggttgtctgcaatgggaagctcccatgacgggagattcaggagaaggctggcataggcttctaacttacaccagtgctccctgatgcctgtgaatgtggggagagggcaaggagattttgagaacagataagagacatttgaatttctcaatgccttctgaaaatctgtgtgcagagttgaattgaaacttaccttgttagcattataaatctgaacactttccttgctaggccacaatgacttaataatatcgtctaaaggatctatgttcactctgcttgcactgatttacatctcctttttccaattctgcgtagtctctggacacttctacttccaaatatcacctgtttaaggaatagcacttaccttgtcttgtactgtgaacccaaatttctgtgaaaaatggactgtagcagttgttccagtttgagattgctgagtgtcatgaacattggttttgaagagtatggagtgttgttggaggacagctcgaggctaaatgtggttgtgcaatatggtttctacacactgtccagcaggtggttggatacagttatgccattctctgcttcttgtttgttgtcttcaaaacatgaaaaaataaaagcaaaatatagaatatcttcgatgaattcagcttctcttaatctcacttttatctcctttctgtaagacttagtcattatttccgaatatgccatcaattttatccaagtgaaaattcagttttagttttaaaacacacagatataaaaataagatgcaaagttctacagtaaaattcttagacataaacactgagatttttggattcacaaataaatagtttagataacactcagaaagatcttttcctcctaattagcttctattgtcacctcttcctaagttgatatgtagctcaatttgttaggaaatggatttcccacgcatgccctaactataatcataagcatctgcaactctgttttcaaacaaagcatctgcaactctattttcaaacaaaggtagttactcatgagagagcttctttaaactgcaatggaccacacagaggtggatgtctagcacatttacagtgaccatgatcctatctctcaccatttcttcttttcaatattgcaggattctaaccatatgactttcccacccctcacctgatgtttggcgacaatatcctggcttctactggcaacaccatcttttgctatttgggtaaatgtgctccttatcagccttggatcctacccaggctcagggccttgtgagtgcaatgtctattgggctattgtggaccccatgactatgacccagacactcagttttgtatgccacatcccttttcagggagctaggtcaaggacatcatgcaactcatttgcatgccatattgaagattcacacttgggggaatattttattctcaggcagctaagaccttgaaactccagcatagtatggagagtgctgagccttcagcatttttagcacatgatttcagccttggaaatctgatgtacttgcagacctctacacaagaggaggtatttgcatagaaacatgagcatgctggggctgggtcatccttttactacacatgttaaagcatacattgtaaccaaaattttggaagcaatgagaatctcttactctactattgggatttggggtcacagcaagactttggaagaggtgttactgagaagatgcctctatgaggtgttactcaaagtcattaattacttacagggctctacgagaatggcatagttcatgtcttaaaaccgcttatagctactggttgagacagaaaaggaaactatgtgctgtgtgattaaaccggtgttttcttttttgcattctgtcttctacatgtgttgtggtgaaatgaaactttaccacattcagcagtgctcaggagaaacattgagcagtgttggtatatatttcaatggcattcaaaaccctgataaataatttaggacttggggagatctgggtatgggaagaagaactgaaaaaaaaaaaaaagcagcggtaatttactaatatatgtttgtaggttaaaacactttttatagctgaccgtagtagatagaatcattctttacaactattaagtggtattaaataggttgacccaactcccttggaaaagtgattaattttgtcttccagacctgacttctgaagctcaaagttggtttaaacagttcagctgtagtagaggatagcctgatatcctagttttgccacagtatctgggccagatggcatttgcagtaaatggaaggtaacaatgatcagctctggtatttacgtgtgtaggtgatatggtcatgtgggagtgttcataggcttacaagccatatggctcttggccataaactattgctaggtaaggctttgactctgtatcagtatgaataaagtagctctttcagctcatgagtatccatttgctttgtgtcaggctgatgtcaagttaacctgcttttgcactctggtgaacagacacatagattattaaaactgaaagtgatctaaaaagttatctaaaccaatatcctacatgaagaaggatcctccctacagcctcacaagtaagatgattagtcagcctctacttgaatatttccagtagtggggagctcataacctcacaaagaagcacagcctgtttttggatggctctaatttttagggtgttccctcttatttttgatgaaaatctgcctctctgcaacttccttagtcatgactggagttctgttgtatgagctgaatccttttatttcagaatagggcatcacatatttgaagaccaacattaagtcccagtgtagttttcttttttctgcatgaaacattcgaaggtctttcagtaaatccccttgttttcttggtagggagtcactcatcaccacttttctcttcccactggagctgtattaagctccttgaaactttgcatcctggagatacagctttctagtcacaaagcccaatttaccttctctgagaagagtctagttctttttattagttttagttgtacagtttgggattctcctttttctcctctttgtcttatttttcttcccagcttcctcctcacgtggcgttgttgtgcataaagttctgaatcatatttttcatctttgttcgttgcaattattgtcactctgtcttccttcttggattatttctttcattctccttagaaaatttttgaattctcccatcagctggagaaaagatatcttttaccttctcctccatcttatactgactatgcaagcagcttatacttaggtcccatgcaagcagtgacttcagaaaaaacaagaataccaacaatgtatcatctcctattgttggctcttggttttgaatagatattccctacccaactagattcatgtgtgcgactctgagtataggtcattcatcgaatgtctgttactgctagagtctttgagtatgtagtctgttgatgtgaacctaaatgtaattggtgttacatgcagtttaaatgtcaccctatttcaacctcatgattctcaatctttatgccaatagctacagtatatttattgtctaccataggatctaattacataagctttggtactgctcgttgtccagaaggatcataatgttagagaggacatgtcttcctcacattatgaaggactaagaaacagaggctcagggagaatatttggctcatccaagattacaccattagttcagcagctggtcagatgctgtttccgataagccactcagctagctaactcccttggcttcaatagagaaagtgacttaaactgtggcatttctggtcttttatactctctctctctctctgtgtgtgtgtatatacattttttcttctttatcacctagcatattttctgatatgtaataagttctcaataaatgctggttaatgaatatttcaagccatcctttccttttggaagttgggaacatgtgtaaaggaagaagactagattgagtgataaagcataaaatataactaggaaagtcatagcttgggatagagagtatatgcagtttgttcagaagtatataaggcattgtgctatgtgccacgatgcctatacagaacgtatagcctagttcctgatatcagtgagtttataatgagataaacgtattatatttggcattgtgaaaatgagataaaaatagagataagactgaatcatatggaaaaaattagtttccagttcaagagaatgttatcaacatcaatgaggagttcagagaagggaaggtaatgaagagcctgctattatgctattgttctcatcagaagaggggtgagtgtgagggaggaagagaggatagatggaagatgagaagagggtgtgtgccagagcactgttgtccatttagtgccagccctgtgtggcaaataggacacaaacctccaattggcttaagttcctgaggtagaagagattaagaatgttaaaaagggaacaaaatttattgagcacctactataggtgaattcatgaatatttcttgatcacctgtctgtggaaggcactgtgttaggtgttagagataaagagagatactatcttcaccttcaagggcaggccaagcagtgtgctaggaacctcacaaaaggaggtgctgaagtcacataagctccccttatgtagttattccagttcctggttttcacgtctaatggatttttccccatagcttctccccctccacccaaccccagcctttccagagtgtgtctgtcttcccaaaatgagtttgatactttgtgcgcatgccgggatccccatgggattgatgacatcatacgccattggctcctattgcacacaagagaggagacagatctgcacattcctgcagttaatgctgagtagaatcttggcagaggtggtggcatccttcatttgactttagaccttcagcctcccttttaaagccctggctcacacagttattgagaagccttatcctgcaaggaacctacagcttaggaaagagttgcccatgtgtctttgctatcaaacaaaagatattggcaaatcttttgtcgattttctattctggcagaggtaccatttattatggggtagatgggatatagataaagcatctccctgcccctaatccctgccttgctgagataaatgcctgttccattccccaatcaccagaaaatgccttggagcaatggagtctaacagcctgagagttgtaaaggggcagcaaagccacttctgcaggaagagagtgtgcatgaaccttattcattgtccatgtgtggagttgcttcatgttcatgctcttcaccctgatttgacacataccaacatcaaataactatctactctaccccatttggatactataataaaaaaaagatagtccagttaccttataaacaacagaaatttatttctcattgtcctggaggctaggacatccaagatcaaggtgctggcagattcagggtctggttagggcccactgcctggtttatggatggcatgttctcactgtgtcctcacatggtagaagcagtgaggcatctctgcggggtctcttttaaaaggaccctgaaagagggtgccaccctcatgacctaatcacttctcaaaggccctacttcctaatactatcacattgagggttagaatttcaatataggaattttgggggaacacacacatccagtctatagcactatctgataaggcttctgaatagtcctgggccattttacataacgggggtttactaaggactctcaacagcatagctcttgcttcaaggggttttccatgcggggcctgccagaatcccctgaagatttgcccttttgcttttgggagaatcattgagagaaaaaggacctggctcctgtgcttttcgcatgctcacccactccggcccttctgattaatgtttgctgttctgctttgcagatgcctcccaggacccagagggagactgtagcctcatttctgtggagacctttggctggactctcctggctctcccagaggtgagagaccgtggttcctgtagcctcaggcttggcaccagctcatctctggtggatccaggattccagatatccaatctcactacagccagggcctctttgtcccagtgtgaccttgcgggctgtccccctgactgcgtcttaacagcccctgccattggtgattttcattccagctacgagccaatggatccctgaaagcgactgtgtgggcttctctcaccatgtcgctctggcctcagcctggcggtgtgctcctctgtggtctggatggggatgatgaactcgggctgcccgttgtttttgttttgtgatatttaaagcagccgaagctctcattactgtaatacagtatgtgcctgggctaaagggggagcagcattccttctggatcagggggcaactctattctgttgtggtgcacccgctggagtgtttagaaccacggctggtagatttacagtgccagggctgacaggggccttggaactcctccattttcattcattccagcctcgttgttggaatgaagagggagctgagcccattctgggtatgggacgattgcttaggccctggggtgatgagtggcagatctgggactagaactcaggcccagaggccagcttactgtcatctggctaagtttctgcttctgttctcttcacttgttcaagatccttctgaggccctgaaccaaatgaggaaaattcatgtaaatcttagcacactgcctgatacataataagtgctccataaacgtttatcagtgctctcataagccctgagacatgcaaaatattcttgcccttcagggacttacagtcttgaggaggagataaaaatttcacacatacacactaacacaattaaggagcaatttaagtcactaaatggttatctgctaagttttggggaataggtgcagtggatcacgcaagagaggagacagattattgtggcctagaagaagtgccatggtgaagataagagcataatgtgtatgacatctgtgtatgacatcttttcaactcctggcagtgagatgaacaggtcagcagccattcctggacactgcagagccctcaggccatccactcatctacccagcacattcactgattatctcccaactctgtgctctgcataagaatgtaaggaagaccatgacaagaccctttcctcaagcctagccagggagacagacatgcataaagatactaccactgaaaaattctacattcatatgtgttcatatcctcaaagcattgtctgagcccacaggtgggtaggcaagtcagataggagcaagagtttgaaggaaagcatacatttacctggtgaaaaggggcaactcacaagccataagctcttgtgcaaaggggctggtaaatgtgagtcttctgcaggagaggtggagttgctgggaggttagacccaagcaagggcattctgagaatgagattgagaagcctctgaggccagcatggggcaagcccttggtgtcacacttggccctggcaatgtggtatttttaacctgggccagaaagtggagaggagcgggcctggtaggatagagaggagggctctttacttatcaagagtaggtaccagatgctggtgactcaaggggaagcttcctgagtggagatggagcctataggtgtttaatcgcctggaacaaacatattttctgcactgcttggttcagaggctgcaagttaaagtaacacagaagagaatgtccggccagcaatgtgaaggaagcatgaaacggaaagggttagaagctgaacttctcttgatcaatgactttattatcttggcaaggattgcagaaactgtaggtgctgagggactgacttgtttggaggaaggggtagggaccaggaaaagaatcccagacacttggtgctaatccaactgctgaatgaggctttcaggctctgggattcaggcaggaactcctgggccatattcttcctaggtatggggctagagagccttcaatcttagtgtctgtatgtccctgggccaatctgctttgttctaccatgcctaacatcagaaaaaaaggggtagattaagtttagagccactgctctgtgtctccatcctgcttctttttcctaaggcaattgagccttacaaggccttctaagtccctatgaggtctacagctgtcagggattggtgaggatggagaacaaaccagtctgttctgaattcaactcttgctttctttctccctctcacaattgaaggtcttcctgagcctttgcctctttcaacagctggatgttgagactgcaatttttcatgattgcttgttttgtattttttcttcatggtctttcctaaagtctgttattcatccaggtccacttatacatcttctaatctattgcaccaaccctgcagccatggcctggcatgaagctgcttgctcattgtcttgttggtttttccaaatgctcacaggcgctagtcatgtaaatctcctcctggcaagaaaaaaagactgactttttgttgttgttgtgttgccccaggtgattcagccagtcctgggctcacaatagatgctaaacatacgattgccacctcgactgctgatctttttcttcctatacaccattctattcataccgctattcaaaaattgatatttataagcacttactatatcccaggaatggtactgtaagttctttatatgcattattccatttaattttaatagtgataccattttctacttttaaccagcttatactttctacactgatagaaaagtgtccctaaacccacagactagttagtacctggctgttttagaagttcctcactcatgacatttctgaagttatcactacaggatatggttgcaaaggcctgggaggagaaatcctttctgtctctgatggtttcagagaaggtgagaggtctctgtctctttgtggtaaaaacaccagggtaggccttgatctcctgagtcttgagtatgttaagggaaagacactaagattgctctgccaaaagggcagacagaccctgcctggtgtctgggaagttgagcccaagtttctctccaaggagggtctcctgcagggatcaggaaggagggtctattggcatcacacatgatctcttctgggttcaggaggggttcctatagctagatgagatagaattgattgatgtctcagtgatgcttcaggccatgttgattgggcctgcactaaaagtaagcagcccttcagagccatgtgctctcaagaggcagcacagccataaccgcaagagtaggatggtcctggtggaaatggcacaatcaaaacaagctcctgggccttgtggctttgagtggctgaactggaaggttcttgaggtatgagcactctcactcacggtattgatcaagcagcgtaatcacatcactgcccccacagaagtggctgccactcagttctcctcagcccaggctgatttctgctctgctggttcataggaaactgcttgggtctttcatgactgctgaagcccaaggcactttccccagaggcagcatcactcacaggatggaccaaatgaaatgtcctggtcaaaggcaggaagtttgtattgttgttcttgcctattttactatcatgtaaatacctgccaaccaacctacacatattctctgagtacttactgagtacttactatataggtgttaatggatacagaaataagagtatggctaggggtggcatgctttttgcccctaacttgcaaatttattgagaacatgatgccaggcacagtgaaaaccaaagagaaatacaaataaatggtaacatttatgagacaggtactaggttctagacacttcttacatgttaactcatttcatccttacaacattcctgtgggcaggtgccattattactcccatttttacaggtgagaagacagaggtgccaaggttcaagtgtgtgcccaggtgcatgacactggtgagaggtgggagacaggactcaaacccagcaagcctggtctcagacaaggtgactcataaggagcagcaagggaggtaggaggcagaacattgagtgcaggggctcagagggtggagggaagtaacttcaatctggtttaaagaaaccagttatcagagacagacagggcctaaagaaggtatgggtggctcagagttttaggaaggaaaaacaggaaattgggctaatagggatagcgtgataagagaacaagtgctaggctggaataccaggggcctggccttgcctgtgagcagctgctgcccctggggaggtcactttgctttttgggctgccttatttttatcacctccaattggagagaattgagaaagatgagctttcaggtcccttcaggtttttaccgtatggttctatgattttgagggctggcatgtttccttggttgcttccaaaagcctctgaccacagtccctcaggctgaccctcttgtgcccagtaatgtggaaagatgaccttctgctcaccagcacatgcttccaagggctgcggagcctgggacagaaggtacggtgggaaagaaaatgagaggagctggttgggaaagatactcacatgcagaaaagtttccagcaagtcagaggtgagagtaaaagatccaaatgaaaagctagagattgctagggctcaccaaggttgaataacttgtccagggtcttagcagactgagggatactggatgataacacttctaaaatactgttttgtatctggaaaatgctctgccttcagtttgcattttctctccttcttcctcccagtaatcaaatgaagacgttagatttgacatttccagtgtgtacagtacagacaggaaactaggtgaatgaagtaatgcagtcaatgttctgtgactccattctgcccctggaagagggatgttttctataatagtcatgtgactcaacatcttcttgtcttcttagaaaggagtgagagaataagatagccatctagcactttcccccctcacctctcctacaaactctagcatctcattttacagaaggaaaggctgagatggaggggagcaaagtagtcttataacaaaggcagaagtggagcttgctatttcatccagtgtgggtcacctcaggtcacctggggcacatcctatgtgcccagatacttacggaaggggtcattctgggcctttggctccacactgaggggctgcattttgagaatcacgaggttgggactcccagaggaaagttgagagttaggaaaacttcaacaaatcctcaggaatagaaacagaacatgagatgagaatgtttgggacagctctgctgtttgtttctgtgtatgtgtttgagggcccatctcttgccaaaaccaagctcatttctgcatatttgtttgcttaatatgaaatactccaaaactgctcttcatatttgtttaatctgaaatgaaaatgactcagcagagaggaaaaacaagatttaaatgccctgaatggcccctgaattaaaatacatagccctaaatcatgggggcgttcttctccccaccaaatcttaatcttcaacacacacaaatgcaagtgccacacacagtcatgcacacacacacacacacacacacacaaacattgtatttgcctgccccaacttgacctcagtccctttatctcttttccccttcatactccagcctttccagggtcctacctttcctgcaggggaggtgcatttgagcttaggtggagaggcctggcctgggctacaggccacagatgattttcctggagggccagcacttcctctccagtccagatcacaggctcagtgtcaagatccctgggggaaatctgaattttcattcttcagcaaagtcgaggccacctcagatagtccctagcttttggatctggaaaaatggactccgtggagagaatggctgtctaccaaatcagacatgtcttgctttttacacaagctgtattcctgaaaagttgggtataaactggatcttggtatgttgcatcaattttgaatgtactgaaaagatttgctattcaaaggaacccagcactggattcttttgtcaagggatgaattactttgtaatggctactcatctagtgatttatgagtttggtaagtagatggaatatttttatatactgaatgttattttaaatgtactgtgtgggatttgttattcaaagttacccggcattgaatccttttgcgaagaactattctgtagtgtagataaacatttcatgatttatgagtttggtaactttaggcatttcttaaagtgggatatacccctagttctgcttcagagaaaaagttgttttttgcaatgatcagacttggagaaaaaagagttctaccatatttgagttatggtcactcctgaggggcttaggaagaatggaggtactcaaactttccattttgttggagcaaaagatccaggagttgcctgctcttcttactttccatattatcactggggtggaaatgatggaggtatttttccaaagaaatgtagttcactattatagctacatttcaaaggtgtttctcttcatatctatatcatttgaatatatatttatatatatatacacacacatacatatatacacacacatgcacatatgtttatacacacacatgcacacatgtacgtatatacatatataatctatcatgtgtatttagatctaaagcaaagacattgcagtagggcttgtgttttgaaccactgaagggctgctgtttccaccagtccagagtgctggggcttgctctgagatcaccaggggtataaaccaggcaagaggagaacttaacttcctgctcactctttctcacttggcaggtcaaaaatcatttcagcacttatctcccaaggttcctagctgtgtccccataccatcctatctgagcactagtgtgaagcttgttttgggaaatgatctgattgctaaggcagttggaaaagagaaatatggtgtcatgtgtgtacaaccaagagctgatctaggatgcccacatattcctggctcatccatgagccacatattcattgaagttcttataggtaggagcaaaccctgcctataagaaccctacatggactggaactgtgtcaggcagaatgttcagataacttaccctttcaccatgatttggccctgaatgtgtctcagaaaaaggcttttagaagctcacccaagtacagagataatttgtgagacatttaacctctcagactcttgcttttttctttcctggagagctgctaatttctagttgtggctgccacactcctgtctgcctgatcttccattttacttcctggtttcctggtggctttgacacatggcctgtccagatcccagtgggggcagtcctgagatggagagctggtggtcttttgtcagatctgggaagtcctgagccatgacttcctttgaaatcaatttggaatgtccatccagcttggctagggaagaggattttgactgtgaagagggaagtgggttctttactacaaaggacatattctctctgagccacatgctccttgatgttctttggtaaatattgggctgtgggcctagaaacactgaccttggagtcaggcgaactgggatccagttcttactctgtggtcttctaacttagtgacccaagcaagtcaaaattaatctcatttcgagatagagatatgcaagatccttgaccttcaatgactcatggtcaggcttgagagaaagtcaggtaaagaagccaactctaattcagcacaatgaatgggaagcaccagccagaccaggtaaaacagcctcaattgagggtgaagtgacttagggccgtacttttctattgtcaaaaggagatgataatttctctccacaggattgtggtgaggctcaatgatgtaatgcatctataagtaactgataaagttcaggaattctaaaatagaaacaggcagtaattctcaactgttttcttcttccactctattcatgtgcaagatgtgctaagacatttcccaatacaacaagtgattcttgaagtataggacgtgttccccccacacctccaactctcggaaatgcacagaaagtgtccttgagattctgatagcctgcttccaggaaaaatgttttgtttggttttgtcagaaaagctaatataaatgacattaacaaggaacacattttccttgttgaaaatcaaaacattacaaataaggctaaagtctccctttgatcaccattcacaatctcctctgacaaatacagcagtccatctcctaactctgtcttggagggaaccactgctgtcagcatggtgtttaatcttccagatcttatatatatataaatgtacatgagtgtgtgtctatcataaaaatatatagtgtgctttacataaactttgcaaccttcttgttcacctaaaaacatgtcatagacttcaaccgttgtaactgtgagtagctctaatgcattcattgttactattgcatagcatttcacagtaggaatattctatagttaataacattatcctacggtagacatttttctaagtttttgttgttaaaaaatatattgcaaagcacttttttgtgcatgcctcattgtgtacacacacaagtctttctttagggtaaataagaataaatgggatatagaaattatggtatatgtatttttattgaaattatcttctaatttatatatccagcagcagagtatgagagtatgcatttgccatattattgccaaagtttatattatcacactttaaaattttgccagtctgataggtaaaattggcattcaactactgctttaatgtttgtctttgtgactacttgagaggttgaatacttttagatgtttacagcattatattgtctcccctgttgaatgctttttatttacttggcccatttttctagtggcttttaaaaaatgatttatagagattattaatactagaagttatttcattatacaatttcaaatatttatcttagccagttgtttacatgttatgtttatgatgtcttttggtcttaaagaagttttgaattttggtggaaatttttattattcttttcatttctggattttgctttccatgtctcatttgtgcaggccttccttatctttagctcatagcaaatttttctagattttccttgaaatattcttatggttccatctttacattttgggctcatttttgtgaggtgtagatataccttcatttgcttttgaaaaggctactaaagcatctgaaacttcttcaccaagtttaaatacccaccttctcatgtagtacatttccatttattcatgagtcttttctgggttgttcattctcctcagtgttctgcttatctatttctataccaattgcatactcagagaggcctttgctggccaccttacctagaacagctctcattccctttctgttacattactctattttattttcttccctgtacatatgtttctttaaaattcttcttcatttacttgttttcttatgtactataagttccatgttggcaggaaccttctttgccttttttactgatgtgcttatcacctgtaatagcacctaatagatatttacaaaatagttgctgaatgaatgaatgaaggccaatggcttgaccaggggtgtttgcattttgagttttatttcttgaggcttaaataaattgtcaaaggggtttgtactactaactaaataagtgggtagagaagggctttcctagcagctccttgacatgcttccatgtatacttttgagttctgttcacatgtcacattgtttaaatattgaacccttggaaagactcattcgaaggtgcagaaaagggtgattctgctcacaataagctttagagatacttccttttagggtatggaatttagaatgaccagatgtagtcactgaatatatggctcaaggcaatcattaattcattctgcaaatacttatcaggcactctggtagtgttgagactacaacaacgaataaaatgaacatggagcttgtgtgtgttgggggggaatacaaattaaacaatcacagcaatgaatatataatgagaaactatgatcatttctatatagaaacattatgtttttagagcatgtaacaatcaaggggatgagagaatattttgctgagaaagtgaccatttagtagagatttgaactaggcaaagagaggagagaaacttcttggcggaggtccttaggcaaaagaaaatggaagaaaaagaaaagaagctccagtgtgactgaggtggagaggatgaggagaagggcagctctggtgaggtaggtggagcccagatcaaaggatgatatagtgtgatgatgagcaaaaacaaaagaaggaacaacaaaaacaacaaaaacccatgtggattttgaagtaacacaagccttaggttcacatatgagtttggtcacctatcaggtgtgtaacctgattagctttaacctctttctccttagcttccttgttgttgaaaacaaacctcattgagttactgtgaatattgtaagagatggtctctgattcgtagtagaagtacatggtataggtataatacttctaggtgctttacagtgctctgtttgttagctgacagtcatctaattttaggcaaaacagaaaaataattattgcttttggagattcgcagcttgaagcccggcaacagtttcaaaaagtaaattagtcaacattttttgaacacttagtaggtttggcttagttcagttaaaaaccatttttgagcacatactttgtgcacgatgtaaagtaatactttggcaatataagaatgaaccattttgaagttaatgattaaatggataattttataacaatgttgtgaaggatccaatagagttaaattaagcatgtgttttggtgaaggaaagaaaggaaatgaggtgtgggagacattctttgcagaaggaattattggggaaggttatggaggggaggaagttacggccagtaacccatgagagaggtgccacaggagagagagagaattctaggactgtcctgcaaaagactgctaggagagggcggtgagccaagtcagtcctgggcctcagcacttactggatggctgcttacaaagagctcgggtctctctggaaggacatcctggattatggtcatgagttagtgctcaactatagccaagaccaatgtctccaggattcacctgtgtgtttctttctctgggcatgtttatttagggacttatttatggaaatagtgttcccgttgctggaagtggctaggaacactgagacatgtattttatcttatccaaatcaattgctatgaaactatgctcatcaccctttgtagttgtagatcacatacccctcagcccctcactatggggccatttaaatcttccgtgttttatttgctttggatccatcctcttcagtcaaaaccatctgactacattgcttttttttttttttaacccctctgggtgtgtcagtattatactgcttagaaattgtcttagaaagcttctgtttcctgaaaaagaaaactccttactcatgtcatcctctgatttactccatccctgttattgcctattaaagtcttgtccatccttcaagaacctgatcagatatttatttctccatgaagccttccttaatcactccagcttaagggaatttcttctctctttataatattgtgtcacatactatttctaatattgcatccaatgcttgcttgattattagtgttactcagagggaattttttaaaaatcactttgtattctagaacagtttttttttttttgtctcactctgtcgcccaggctggagtgcagtggcacaatctcggctcactgcaacctccacctcctgggttcaagtgattctcatgccttagcctcccaagtagctgggattacaggcacccaccaccaagcctcgctaatttttgtatttctaacagagacggggtttcaccatgatggccaggctggtcttgaactcctgacctcaggtgatccacccgcctcggccttccaaagttctgggattacaggcgtgagccactgtgcctggctttctagaacagttttatatttacataatcattgtgaagctagtacagggaatccttgtatatcccacatccagtttcccctattattatcatcttatattaacatagtacatttgtcaaaatgtatgaactgatatagatacattattattagctaaagtccattctttattctgatttcctcagtttcccctaatgtcctttgtctggatataacattacacttagttatcatatctccttaggcaccctgagctgcgatagtttctcagactttcttgtttttaatgaccttgacagttttgaggattactcatcaggaactttatagaatttcccccaactgagacttttctggtgatttttttataagtagactgaggtaataggtttttgggaggaagtccacagaggtaaagtgtcattttcatcacatcatatcaagaacacatactatcaatatgacttatcaatgttgatgttaaccttgattacctgtcttgaggaagtgtttgtcagatttctccactgaaaagtgaccctttttctttctctgtttttacactgtacttcttgggacaaagtaactatgtgcaacttactcttaaggagctggggaagggagatagtaatgcttcattttcttaagagcagattatctacataaattatttggaattcttttgcattggaaatgtgcatattctccccatttgtttattcaatcattaatttatagcagcatgaactcatggatatttattttattctttggtttataattcaatactgctgtttttgaggggaggaactcattaagttggctactgtgtccctttgtcataccccatcatctttttgtgtgtacattttctcaatttctggcactaaaagatactccaagtccatcttgtttatagtctgctccattcccagaatcagccatttttctgaggaatcctgtctccttttattgaagaatgttattagaaatcaagatctgagcactaggtttgctcattgctactgggatgtcattgcctctaggccttttcagcggatggaacatatgtgtgtatactaacccaggcatatacacatatctataaatatttccatatgtaactatttgtatccttattaagctaaacataagttcatactgatgtctccaaatctaatctattatcatagattagatattatgaatcattttggggaaacctgaaaatacagaatcccaggtatcactccaaagataatgaatcgggataaatattgaacttatatgttttgaaaggcaaacattaaaagtaaatgcttctcttggttgaatattggaatcaatatcaagattatgaaaacatcagtttacatgataaatataagttttactttaccattattcaccatttgggtaagtatttatcttaggaaaacttcgtgtgtctgactatacttttgctaatttaaatttcatgagtgtgcaatctgatagagtttgaaaattattatattaggtgattattggatgtgccattcaactcccaaagtctgtgattcgaagtcccatatataaaaacaaacactgcaggaacacaaaattaattgtgagaattgtactcattcatgttggcagtatctgcctcactcatttcctctccttctctttctgttttcttgcattattggttggtggcagactccagttccaacaccatcttctgagatgatcctgattcccagaatgctcttggtgctgttcctgctgctgcctatcttgagttctgcaaaagctcaggttaatccaggtaacatggctattactcagctatatgctagaagaccagcagaatgtttaaacccatcaatgttcaatggtgggtctaaaagctgccaagagggactacaaagctctttctttttaaatctccatggtgaaatatgactaaaataggaagaaaaatgaatatactttatatatatgtattttaatacttacaacctgttgaatattgtaaaatattttcttatatagagtaggggtgcagtaagagggcattttaaaaaatgggaggtggcagaagcaaccatttgcttctgcatcttctgagaaaaacaggacagaatttttagatgtcttggagaacttcttcaggttggtttaccagttgttttgggctgtcttagactttgattttacttggatgtcctgttatgcttttgggatcctggtcctgtgggatctcaggcaggttctctttcctctaggatgtggccatgctaaaaatagataggttaggagaatcttttgagcccaaatttgtgggattattttgtattacatgcatttttaaagtttaaatggaagtaaataattgtattatttattacacaataatgctgcttaacaacctatccaaagctcaatgtctttaaacgagcatttatttggctcctagctggacttgtttggactgttctctgttctgtgttgatttactcaagcataactggaagtcagctggctattggctcatctaggatggatgtggcactgatgaatggggcaactttgctgtgttctgtttcatcctcctgcagactaacctgggtatgttttcctggaaattgcacaggaacaagaccagaagccagaatactcaaacatttttcaagccactgctgaaatcatgtttactaagtctcattggccaaagcaattcatgtggccaagcccagagtcagagtgggagagcacaaaaaattagatggtaaaggtctgggatgcaggtattggagaagaattggagtcatttttttttttcattttgctacaaatatgaacatggaaaagtatacagcttaaatgttcaattttatgaattcataaactgaacacatctaaacagtacctggattaagaaacagaactataccagcactttagaagctctcttcatgctcccttccagtaacttttctcaccaccccgcaaaggtagccattatcctgctttctagcaacatagattagttttgcccatttttgtactttatataaatggaattagatgatgcataaatactctttgtgtctggcttctttcactcaacattttgcttatgaaattcatcctactgttgcatgcagttgtcaactattcattttcattgttgtatattactttgtttgaacattttatttagccaatctactgtagatgggaatttgaataatttctagtttgggcccattatgaacaaaactcctataattattcttatataaaacttttggtagagataagtactcagttcctttgagtatacacttagaagtggaacttcatatgtgtagcatatgatatactattctgcataataccaaaaattttttcaagtactttaccattttaccatcccatagcagtatatgcaagttccagttgttccatgctatattttgattcttgagggtgctttaattttgtcctcttcatagcataagggtacatttgtgaaaatgcttgctctcctcccttcataaaagttccatgtgcatgggtttttctttataccttcaataggaaatatgatcaaacatccttaaaatcaaagaattattggctgaaggagcccagtgccttgttactttctcgtaataagctcagctgttgcatctcagatcctaacttgggtaccattttttcctttttctgttctgtattcctctcaatcaattgttgatgtttggttgcctcctactacattcttcatgctctgagttctaaggaagagtgctgtgagtgcatggaatggtgggatgttttggtggtaagcatagtcatggagactggcatgccacgaggacatttaaatgactaaccaggagagctgatcttctgtgttagagtccacactgtggccctggagcaggaaatgggctatttggagacagcaaatagtcatcttaatttttttttctatttctggtgtcaggtatttttgttggctctttctgacagggaaagagaaatagacttcttgctttgcaaagacctttataggaaaacaggacatgttgaaggactaatccttctctctgccatttctttctattttaccaagtcaaaccagagatgagtgtttgaggcagatgagacattttcattcattatcagtgataaagagtctatcatgaatcctgaggctcatagaatgttatagcttgcacactgctgagcataaagtcagcatatgataaatgcatgttgatttaaggatgactcttcaggagtccttactggtgtcaactgaaagactgactataactaaaagtattgaaaggtaactgaaggcactgaaagactgagtgaattcttggccagttaggtttttcccacagaatggccacatgatataacaaatagaacttaagccaggagacctgagttataagcaaatccaatatgcaaccaattattaaattactgaaacattttagttggttattagctataacatattggttggttaatagtaactgagctaagcattaaactcaataaaataaaaataaaataataattagttgaagctcattgttgaagatcttacaatgactattggtcaataagccttcagtattagcatgatttagttgataacaaacattaaacatgatatgatatgaaatatcaatcttggtgtctcagcagataccaagagaggataaataatcttgtttacatttaaaaaaactctctagtatttgaaatcataaatgtctcacaggtgtcatccatggaggctgcagagtagtggtggtatgacagagatagttggctgaagcacgaaggcagcagagtttttggctcactgttctaaagtatctgagttttggcaaagcaggcagtcaggcagatggtgttagtggcatttccagtaatggcagtgttaaaggtagcattgtcaatggggcctggagcgtaggctacgcaagtctttgtgggaaatgctgacatgaaggtgtatatacatagtcctgaattgtgggcagagttctcagctatcttccagctgcaacagtgcaccaggaactggaacctaatcatcattaatccagtgggagaggttattggaagaattagaggcagtttcttatgtcaaaatcatggctcagaaataccatttagctagtgacatccaaatcaaacaaataatcatcccaataatttctgaaaatcatttatacaaatcaacagatgattggaatgttattagttctgatgaatgatttggagttaacttagaaaaaagtatttagcttaacttttgagtaacaaccctaattataatcctgacttggtcataaattaattgtgtgacagtgagggagttgttacgtgtctctttatacttccttaatattttcacttgtagtaagattaagttggattagataatctatgggaccctttctgctacaaaattactgtgatttttatgatgtgagaactttatagcccatactggaagatttgggcttggaagtatagcccctgaagttgcatggctgttttttgcaagaaagactacttgtttccaactccctaccacttcccaggctcagggatgtgaagtctgaatttcaggagaatcttgcctttggggctaagcacacaggaagtgactgataaatacttaaaaattttaaaccctaaaactctgcttagtggcaggtgaatgcagaaaccctgccccagcctaacctgcaggagagtcatagtgctacaagctaccctgctccagagcatcttttgctctagaggtggggccaagaggtagcatttcaggctgaagatatagcgtatgcaatggctgagaggagggtgaggaacatttggggctcctggtggaggataatgagtgagagagccagcggggctatgtaggagatccattcccctgtgggatccttgagtcaagttttcccttatttccagcttgggctgggactgccaaacttgataggagaactaagggcatctccatgggaaagagaccccacaatcatgcacaaaaatacggggctgcagtagttgtttgagtggacatcagtgtcaggctcccctaggggatataaaaccactgtttcagtggttagtggggaactggcaccttacgtttttccaggtaggaggatgaatagaactatcctgatgatcctgaaattctagcccagcagtctgaagccctgggacccacccagccaattagaggattgttgtgtataaaaaacacaggggtgcttgttcttattcccctgacttggcctgtgacaactgtttgtgctcaggaaagggagaaacatctcttcttctcagcaggcaaaccaggcctttaggatccatggtataaagctgaggcagggcagtgctggaacttcccattttcatgtcacactttcccctcataggaagcaggcaacttactaccagttcagagtcctggggtgggagtccccctttggtatccagaatgcttccactttgaaaaagagtggcaaagccattcagggtttgggattaggagaggacgagcttttctcctcctggccccaaatttattttaggttcaccactgtggtttttgttctttccagcatcagtcccacatgtcagtgagttcttagggtcaggcaactagaattctagactgttcatgttggaatggaccttagaaatatctaagtcactcttcctcactttacagatgaggaaactgggagtcaaagcaggtgagtgatttgcccatgctccacatttagctaatagttaagctaggacgaggacccagggctacctgtctcccaatcccaggtgacttctacctgggccctcagggagcaatgtgctgaagtgacctttatctaaaaatcacatatatccatgcagcctcatgctttcctttctgcaaccaacttccaatgtatatttatggggatgagatgtaattgagatttgagggacagcctgaggccaaagaatggagtcagacgaataggatatacagtgctcacacctagtctcatgctaaatgaggaaggctggagctagaagccctgcgggccaacttacccccacccagaaactgaagcaccagggatgctttggttcccttctgcaccaggttgtgcctttatcaccgctcccttgtcttccaccaaggctgctatgtgttaattcacctacacatatttccaaattggaaactcatttttgtttccctggcttctcgtcattcgtgttcccagagatgtgctgagaaggtttatgtggcctcatctgttaacgagaaggtgatgctagtttcaggtttgtgaaaccaggcctgaggtactagtgttgtgatgtgtgtgtatgtgtgtgtgtaggtgggtggcgcgggggtgtagtgtgtgttagatagcctgaacaggccttgagaaaaagataaaaggccggcaaaagacctctctggttgaatttatcttaagtgagcaatgctagaagctgcccagattggctctttcttgcttgtgtgtttgttttttaagtctaggctgacgcctgagagtggcctttggcatccttcctgccagtaaaagagcctttctctgggtaaaacagaaactcatctgccccttgagccctcttggttgtgccaaatagggaaaaagagaatgcaaaactcaaagaatattcaatgaacacttaatatattctgggtaccattttaagtggtgtcaacaaatttaatcttcacaataatcttattagtattagtattattatataatagtagtattattattccagttttacagaggagaaagtgaggccaagaaacattaggtaactcatagcaggttacagagaaagctaagtggcagaaccggcattcgactctgctccagcaagcatgctcttttcttctacttcttttttctttatcccgtttttcaaatttccaacaatgtatcagttaagagtttttcgcttgtttttttgtttgtttttggagagggcatgttgctctgtcacccaggctggagtgcagtggcatgaacatgactcactgcagcctcaacctcctgggctcaagccatcctcctgcctcagctccccaagtagctgggactacaggcatgcgccaccacacccaactagtttgggtactttttgtagagaaggggttttgccatgttggccagactggtcttgaactcctgacctcgccctcctaaagtgctgggattacaggcatgagccaccacacccggccacaagcatgctcttgacctctgtgctctactgcctttggagtgtgagactcaaggaatgtcagggcagaggaaacccagattcatggaccagccacgaatgggctacagagacccgtgaatcccctgaaattgcatcccaaacttaatgtgtgaagacaaaagtacatttgcaaaatgaaaaatgttttctattatcagatgctcaaaagactctgtgaccagttctagaaaagactaagaatggtggatttaatctaatcttgtacaaatgaggaaactgaggtttagggagataaagtgatgggaggaaacatgtttgaaaagactattagcagacctaaccaggctttgcctactcgctggacgagcatggtcagagttttgggttctctgaactgcagtcttctcacctatcactgatcgctgccttaagggctgttaggaagagtaagagaatatatgtaaagtacctagcatagtgtcaaacacacagaatgtgattaataaatgctggaacttctgtcctcttcctcaattttgtatattgtgctgtgataatggcagacttcattagtctttccattattctatactgtcctttatattttagtttaatcatttcattaattaattatttaacttaattactatactgtaaaaatatttcattttctttgagggcagacttcacctaattcctgggctttgtatcttgggataaaagggttccaaatacatctactgcatcatcacctttccatccaaagtagccaggtgaattcccggttcataccctgaaactttgccttcaccctgttgttttgcattctgaggcctagattcctagttgtaaaaggcagtcagaggagctaaaagtaatgcaagaaaaaacaaagctccactttttttctgttgtcagtagggatagaggcccagggagacctagtctccttgagtctaaactttggggccaggagcatgatcatgggactccaggaagagcttcacacaaagtcccttttctggacctctcagttttcacaaccacctgcagagctcagttttgctcagggctctcgtgtggaaagactaagagtctacagaagaacaacagtgttggcaggagcagacaaggagacagggaccctgcttaccatggaaactgggcgcactggggccattaggtccgtgcatcactgctgcttcacatatttgcttattaatgttttgttctgaaagctgacaagaactctaggggcttcaagcccataagatcaagacatacaatatagcgatataagtatgtaagaaacatagattgatacagatataaaataggaaaaggatatgaaacaaatataatatatatgataaaaattataaatattataataaatatattataaatattataatatttaatattattaatacattaaaatataaacatatatttatattttgtaaatataaacatatatttatattttgtaaatataaacatatatttatattttgtaaatataaacatatatttatattttgtaaatataaacatatatttatattttgtaaatataaacatatatttatattttgtaaatataaacatatatttatattttgtaaatataaacatatatttatattttgtaaatataaacatatatttatattttgtaaatataaacatatatttatattttgtaaatataaacatatatttatattttgtaaatataaacatatatttatattttgtaaatataaacatatatttatattttgtaaatataaacatatatttatattttgtaaatataaacatatatttatattttgtaaatataaacataaatataaatatatatataaaatatgtataaaaataaacataataaatattataataaatatacacacatatatatgtgagtatatttatgtatgtatttatatatagatatatctatatttatgtgtgtatatttatgtaagtatatttatgtatgtatttatgtatatatagatatatctatatgttcacatgttacatgttatatagatatatctatctatatatagagttaaaaataaataaataaataaataaaaataaaaataaaaataaaaataaataaataaatacagaaaagcctgggagtttccttgacttcctttttccccctccctcttcttattcatnnnnnnnnnnnnnnnnnnnnttttgttctgaaagctgacaagaactctaggggcttcaagcccataagatcaagacatacaatatagcgatataagtatgtaagaaacatagattgatacagatataaaataggaaaaggatatgaaacaaatataatatatatgataaaaattataaatattataataaatatattataaatattataatatttaatattattaatacattaaaatataaacatatatttatattttgtaaatataaacatatatttatattttgtaaatataaacatatatttatattttgtaaatataaacatatatttatattttgtaaatataaacatatatttatattttgtaaatataaacatatatttatattttgtaaatataaatataaatataaatatatatataaaatatgtataaaaataaacataataaatattataataaatatacacacatatatatgtgagtatatttatgtatgtatttatatatagatatatctatatttatgtgtgtatatttatgtaagtatatttatgtatgtatttatgtatatatagatatatctatatgttcacatgttacatgttatatagatatatctatctatatatagagttaaaaataaataaataaataaataaaaataaaaataaaaataaaaataaataaataaatacagagaagcctgggagtttccttgacttcctttttccccctccctcttcttattcatcaaacatttgttgattgcctatataagccaagcactgtaataggtgctggtcatgacgacacaacagattatcactacaccagagacaaagaccaaagtcataaaaacctctgaagcaggaagaaaaaaaaagttgcataaatttttttaacaactcatcacctcccacttaggctcataaaaaaacctcactgattttagtgtcttaacttctactttactgtgtatgtgtccaaactactgaaaaattctgtgagggctatcttgccacatccatactcttcagagacccacaggccaggaccaagagctaagtcgacaatcacactatatatatctatatatatatatatatagatataatcacactatatatatctatatatatatagatataatcacactatatatatctatatatatctatatatagatataatcacactatatatatctatatatagatataatcacactatatatatctatatatagatataatcacactatatatatctatatatagatatatctatataaatatatagatagatatctctttatatatatatagatagatatatctttatatatatatagatagatatatctttatatatatacatacatagtccataaatatgtacataaatatgttcacattttacccaatcaggtcaaatctccaatgtcatgctagttgagatactgaaggtatgagagttagctggagctgaaagaatttgccaggccaggtaaaaagaggaagggaaagcttttgagctgaagaaaaggcacagaggcacaaatagaaaaacaagagtgaggatagtgattattgaggggtcatgaaggcaaaggtggggttaggatggcaccaaaagtaggaaccatataatcttgggatcctcagtatatgacaaatgttttatgatcaaaggccttgtcttcacctggtgttaacataatgctatgccatgctgtctttcccagagtgcaggttccttttgctatcacatttcaacaaatcctgggacaagcacattctaaaaattagacaagcaataatcctccctgggctctctgtccagattcttccccaacttggtgattcttgaccctagtgatcacatgataaacagggtgtgtgtgctggtagcagggtgtgatgaccacgtgatacggttactagacagactgtgacaatggagatcaagagatctagattctagttccagctctgtcactatctagctttgtgactttaggtaaatctctgcacctcactttgctcatttataacatggggtccataaactttgctctctgaacttcatagggttactgcaggggattgaaagagataatggaaataaatgggctttggaaaattacatgcaaatatcaaagactgtgatttgttacttttggaagaaaagaaaatgaaaataaacactatgaaacaacagtttctatcaagcagatgatgcaggaggaagaaagagaaaaaaactccattagtgatcattaaggtcccttgtggtccccaagaccgactcaagttgcttttggggaatggggcttctaacagtcctgaactctggccaccctaactctaaagggatgcaggaccctgtgctcaagccaagcatatccatttatatatatatatatatatatatttttttttttttttttttccttgggagaatagtgtgattgttgacttagctcttggtcctggcctgtgggtctctgaagagtatggatgtggcaagataaccctcacagaatttttcagtggtttggacacatacacagtaaagtagaagttaagacactaaaatcagtgaggtttttttatgagcctaagtgggaggtgatgagttgttaaaaaaatttatgcaactttttttttcttcctgcttcagaggtttttatgactttggtctttgtctctggtgtagtgataatctgttgtgtcgtcatgaccagcacctattacagtgcttggcttatataggcaatcaacaaatgtttgatgaataagaagagggagggggaaaaaggaagtcaaggaaactcccaggcttttctgtatttatttatttatttttatttatatttatttatttatttttaaatggagtttcactcttattacccaggctggagtgcaatggcgcgatctcggctcactgcaacctccgcctcccaggttctagagattttcctgcctcagcctctcgagtagctgggattacaggcatgcaccaccacgcctggctaattttgtatttttagtagggacgaggtttctccatgttggtcaggctggtctcgaactcccgacctcaggtgatccacccaccttggcctcccaaagtgctgggattacggcgtaagccaccatgcctggcttttttttttttttttgcaaaaaaaaaaaaaaaaatctaaatgatgccatgtgagacttgatctcagaaagatgttgggaagctgggaaggaacccataggaatatcatccctttaaatgatgagatgctgagtatggtgtgagtaaattagaaggaagataatgaaccgaggccatttcagctgaagctaccaaagtgcagcaccaggtccagccttctagtgttagagaactgggagagcccatctccttgcagaggtagagcagcccgggactgcaggggagggtgaggccttcatgcttgttcctaaatgcctaaggtcttcgtttaggctacaagcggagcattttgattgttatacataaaggaaaatgtggttaaatttaattcaaatatatgtaaatatcttatgattggcatttcaagggaggaagtcagattcaatcttttggctactgtaacctatattaaagataggaagtatgcaatgatgtgtactgtctatgtacaggtattgctaacttgagaaatgtattggcatgggaggagccctgggcttgcccataggacaaatccacctcgaaagcagagcagagtgtcttcattctgggtagctggtaggatgtaagcctgaattcttggtcttccagtgcttcttaaaaactcccacgtgctctctttcctcaccaggtcctgaactctaatctgtgtcctgtccgactctcaaaaaatcagctcagctcttcagagggcttctccttacattccccctccacacagccccagcatttggcacatgtgctgagtgagatacactgcatgctcgagggataccaggtctccctcaaaaactctgctaattttgtcccgtagagaccgtctgctagtgccaaacccggagtcggcctcctgcccctgctccaaatgggcaaatggctgaaagtggctacagaagttccctcacctctctgagattctcccttctctgaagtcttggtctctgcattctcattgcctcagaaacaatcagattccttcaagtagatgatttatgaattttatttagctcttccagttacttttagagggagcactaattactgcacactactccatcccacctagaaacagagatattaataaaaagtgaatttatactttattgccactgtgattcatgttaactaatcatgttttactttttgacttgacttctaggaagctcagagccaaagttgaaacccatcatcagccagtggtatagaaccaaatgtaatactctttctgtattaaccttagctctagcttatctaattgttcctattttctttttcctttatccaaatttcttcacttatttatttatttatttttatcttatgcaactttggaagccgactccaaactttactgagtgagtcaaagtaaaaataattaaaaataaataatacctaactttattgaatattagtgctctaagtgcttgacataattaactcatatattccttatggcattcctataaacaagtgcaattactaccatgaaattgagaggctgaaagcttaagtaacctttctaaggtcataaaaccttttaattgtttaaggaagagtgaatgtactattttaaacaaatagttctctcttctcctcttagatatcatttattgagccccattacattctataaagtatgctaacttctttgtatacattatgttaaccttggcttggcaggattatgaaagatgaagaaaccgaagttcatagaggtttggtaactggtagtggggtcccataattcagaagtggcagagccaagtcttaatataaactttccatgattccaaaccgtggcctcagttttcttcttcactcctgatctgcatagctacccagtttcctcttcagcttaccttcttgttggggaaaggagatactatttactatgaaagtttcactgtctttgttaaccaggaagaagaattcattatctgatccctatgttagtatcctgaaacccactacagcttggggactgctctcctggggctctgcaagaattgtttctggaaagtattttgggcttccaggaaaactgcaatcctaaaggtctattcctaaggggaatttcaacttgtgcaagaggtctgggtgaccattatacccaaagaatagccctgtaggctgaagaaagaaacccaaataatctttcttggcccccctgtggaatcccattgtgtcaatatttatctgcacaaaggaccagtctgaaacagcctgctctgtgaagcttgtgggaagcagggcctcagtgacagtttctttaagtggactaccttgtcctttcagaaactggaagaactagaccatggtagcctagggttggaggaggaagaaccagggatcaggagacctgaatttcagtcctggttaccctagccctctgtgtgaacttgagtaagtcacttcacctttctgggcctcagaggttctgatatttaacacggagacattagagggattggcttcttaaatttgcttctgggctccaacgttttatgattgcagatgtccctttagattgtagactggcttgagaccgctgaccccaataatgcccctcagtcagtcttgtctgggcccagagaggcccaggtgtcaggtctctgcacctcaggcctcatgtgggccatgtgtgtgttttcctggaagctgcatataggacactcattgacggggagcccgtggtctggagctagtagtgagatggtaaacattatggaacaagcagccctttcaggctctcagccttggcaggatagtatgaaaaataattcttgggaagctggggactggtggcagctgcttctcctcagcctgcctgccaggccctaccagagcttggagggctggagctccctgctgggcctgccacagcctgtgctggtagttttccactctgggaaactggaaaagtgaattggcttctctgtccgggagattggtgggtagcggaagcatcagaaaaccgctaagacaactcagcaggaaaaaccaggagacacttctttgctgcagggtctcttgcttcccttgccattcccagctttttcatgcttctttacagttcatgatagaacaaagacagactggtgggatttgatgaacgaggaagtggaactgggggaaagcaaggagacctgacatttagggcttgggccaacttggcagttctgagtcttgactattggctgagatcccttccacagaaggagtttacccaaaataggcacattcaatgggaaaaccacactggtacagctgagaagtgccacgttggttgccctgggcttttcctggttccaaagattcagtaggatgagaaaggtcatccaagatcatcttgtccattttcctgtgccttttctctaaggcccttgggcatactgagtcactgagaaactttgcctattttcttaatgtgactattgctgatttactaagttcttatctctgaattgtctatcctcatccttatattactttgtcacaatttctagacctccatcctaactttcgttgtctggagattgtgtgcaatacttgtagccctctctgccttttcatctacttatttatttgccaaacgtgtgttaagcatctcatgggtgctgtgtgttggcaggtactgagggggaaaaggaagaatctgacatgattactattctcaaagttgctcacaatttcaacaaggaggtaaccaagcacaagagtaacagaaaatctccgttggagtttgttacttaatagagctcgcctacacaccatcatcactttaatcccatgccacgttttagtattttccatagcttcgtcacattatctgaatagaaagagccagtaatagctactgtcaaatacataatcaaattgtgcctatttgattatgaaaaatctattttcttttttctgtctcccctaccggaatgtaagatccatgagacaaattattttatctgtcttgcttactactgtatcttcagaagaacacccgatacacagcaaaaacttatttattaaataaatacatacacatttgtaaaagaaatacatttgtgaactcaatacatgcaggtaaagataggttgcaataaaatatgtcatgactcagacttacaaggaagtttcctgtatctcctgtctgctaaaacaccattagccaaggctacccttgaccaaactcccaggactttgtttttaagccttgtaaagtgatgaacaacagaaaacacttcctttatcacttttcaatagacgtttattgagcacttggttaatgccagacatcctactagaaattggagatacaacagaggaagatagatatgatccttgccctcataacacatgctgtttagtgggcagaccaaaattaaacaattatttacattacaagtctaaaaactgttatgaacgaaaaccagtttgttataagagcatataatagaaattcctaacttagctggggacttgggggaattccttgggggagtgactggctgacagctgaaggatgagcaggagctagtgagtgaaggagggaggatgcacatcccaggtaaagggagcatcatgcacagagaccttgaggctggaagatactttgtgcattcaggaactgaaataaggtcagcgtgcttggtagagagcaaagaacagggaatagccagagatgaggccagagagtaggctgagacccaatcgtgtggacctcaagggtcacattttcttaagaagaatgaaaacctgttagaaggttcatgacagaataaagttttaggaagctaatttgggctattgtgtggagaagggatgatagaggaacaacgaagaagagctagaaggcattatagtggctcagatgggaggtcatggaggttgcgcactgcatgggaagaatagaggagagaaacagctggactcaactgcaggaggtaggatttgtagaacttgctaatggactggatggttctcaaaggccaagcttacttctcattccttgactgccgcctgttgagagtaacatcttacctatcattcctggactcttcctctccaagaattctattttggtctccaggcagaggttgactcagggagagcctttccagttttcatcaatgtcattgccactctgctgtccaccacacagttgacctaaaccctctgtatgctggaagagctggacgagtcgaggaagaggggagcgctgacatgtgtaacaagttatttacatgaaatgaagcctcatgtcctcccctacttcctctagttctcaagcttgagtctgcattagggtcatctagagtagtggttaatacactgtttgctaccccctcccagcaaccccaccagagtttctgattcattaggtcaaatggagactgataattagcgttgctaatgagtttccaggtgatgctgatgctgctggtcctggaagcatattttgaggatcacagctctaaatggtaactgaaatgcaatcacaatacatagatcaaagagctttcaggaaggaaactggcactcctttgacaccacatagcagagtatcctatatggatctacctccacatctgttatataggaaaattcctgaatgggttcagttaggacacaaaatataaagggtttctatgcctaggaaatataatttaactgaaatgtgtcataaaagcagctgcagcagcagtagctctgataaaactccttagttgccattctcagaatgagcagtacgttagaaggaaagttatttgcaacaatatcatgattcacctcatgtgacccacattccctatttctgctttactttagatattccaagaagcagaggctctcattgcattcatggcctagtgtttagagatgcattaaagccagggatgaaagcccagtgggacggtcagtgtggctttctctggtgcccagcatggtcctagagaatcattacacgtccaggctgaagggacctgggagcagtggctccagagcctggctacacagcacagtcacctggtggactgtaaaaatatgcaggttactgggctcagcttcaggtataccaaagcaaaatctctaacaggaggctcacaaacatgtattctaaaacctctccaggcttttctaatgctattggtccatggactggctttgggaatcactgccttacagaaagcctaatagaactctcttgctttccacatgaagaaacagaccgaaagagagccaggagcttgctcagatcccacatggtataagtggtagaaccgggagtggatgcgaagtcttgattttcaagggttgtgtgctcagtggaattacaggctttagagccaagttctaagatgagttagtatttactcaaggaatggcctttgcagttaaaacttacctgtagaatgtgtgattagtgggaaacatgaaatattgggtggaaaatgcttatcatattgcctgacacttggtaaatgcttctaaatggatgtcatcattactgcattttactgaatttaagcaactcacgactctaagatgcatcattactttatgtgcctctaagaaagaaagaaaaactactgccagttaaactatgacactatttgcttgcgaagtgcatccagatttcagagatgtcagtacgtgaaagaatgggcagtgtggtatttcacttctcttttctcaactctatgaagattcttactttactgaattagacacttaacagtacatgaaaattcctgaaggagaagtatacttagtgtgtttgaggaacaacaaggaggccagtgtggctgatggggaaagtggggtaaggacaaggtccaagacagccaggggatgtctgattccatgtcttcactattgtgaatagtgtgaacagaagagtttcatgatatgactttcatttcttttatgactacatagtattccatgctgtatatgtaccacattttcttttcttttctcctttgctttttctttctttcttttttttcgtttctttttttttattacagttttattttttatttattttttttggaataattttttttttattatactttaagttttagggtacatgtgcacattgtgcaggttagttacatatgtatacatgtgccatgctggtgcgctgcacccactaacgtgtcatctagcattaggtatctctcccaatgctatccctcccccctcccccgaccccaccacagtccccagagtgtgatattccccttcctgtgtccatgtgatctcattgttcaattcccacctatgagtgagaatatgcggtgtttggttttttgttcttgcaatagtttactgagaatgatgttttccaatttcatccatgtccctacaaaggacatgaactcatcattttttatggctgcatagtattccatggtgtatatgtgccacattttcttaatccagtctaacattgttggacatttgggttggttccaagtctttgctattgtgaataatgccgcaataaacatacgtgtgcatgtgtctttatagcagcatgatttatagtcatttgggtatatacccagtaatgggatggctgggtcaaatggtatttctagttctagatccctgaggaatcgccacactgacttccacaatggttgaactagtttacagtcccaccaacagtgtaaaagtgttcctatttctccacatcctctccagcacctgttgtttcctgactttttaatgattgccattctaactggtgtgagatgatatctcatagtggttttgatttgcatttctctgatggccagtgataatgagcattttttcatgtgttttttggctgcataaatgtcttcttttgagaagtgtccgttcatgacaaacccacagccaatatcatactgaatgggcaaaaactggaagcattccctttgaaaactggcacaagacagggatgccctctctcaccgctcctattcaacattgtgttggaagttctggccagggcaatcaggcaggagaaggaaataaagggtattcaattaggaaaagaggaagtcaaattgtccctgtttgcagacgacatgattgtttatctagaaaaccccattgtctcagcccaaaatctccttaagctgataagcaacttcagcaaagtctcaggatacaaaatcaatgtacaaaaatcacaagcattcttatacaccaacaacagacaaacagagagccaaatcatgagtgaactcccattcacaattgcttcaaagagaataaaatacctaggaatccaacttacaagggatgtgaaggacctcttcaaggagaactacaaaccactgctcaaggaaataaaagaggacacaaacaaatggaagaacattccatgctcatgggtaggaagaatcaatatcgtgaaaatggccatactgcccaaggtaatttacagattcaatgccatccccatcaagctaccaatgactttcttcacagaattggaaaaaactactttcaagttcatatggaaccaaaaaagagcccgcatcgccaagtcaatcctaagtcaaaagaacaaagctggaggcatcacactacctgacttcaaactatactacaaggctacagtaaccaaaacagcatggtactggtaccaaaacagagatatagatcaatggaacagaacagagccctcagaaataatgccgcatatctacaactatctgatctttgacaaacctgagaaaaacaagcaatggggaaaggattccctatttaataaatggtgctgggaaaactggctagccatatgtagaaagctgaaactggatcccttccttacaccttatacaaaaatcaattcaagatggattaaagatttaaacgttagacctaaaaccataaaaaccctagaagaaaacctaggcattaccattcaggacataggcgtgggcaagggcttcatgtccaaaacaccaaaagcaatggcaacaaaagccaaaattgacaaatgggatctaattaaactaaagagcttctgcacagcaaaagaaactaccatcagagtgaacaggcaacctacaacatgggagaaaattttcgcaacctactcatctgacaaagggctaatatccagaatctacaatgaactcaaacaaatttacaagaaaaaaacaaacaaccccatcaaaaagtgggcaaaggacatgaacagacacttctcgtttctttttttttgagatggagtctctctctgtcgcccaggctggagtgcagtggtgtgatcactgcacctccgcctcccagattcaagcaattttcctgcttcagcctcctgagtaactgggattacatgggcacaccaccatgcctggctaatttttgtatttttgatggagacagggttttaccatgttggccagtctggtctcaaactcctgacctcaagtgatccgcccacctgggctgcccaaagtgctgggattacaggcgtgagccaccatgcctggcccacattttctttatcgaatccactattgatgggcacctaggctgatttaatgtctttgctattgtgaatagtgtgagcggaagaatttcatgatttgatttacattctaaaagatacatgggaaaaggtggacaaagggagatcagttaggaaattattgcactattcctggcaatggaagacagtgaattagcttattatgatagtaaaatatgtgagaagaagtaggtgggatatgggaatatttttagggtagccagtagaatcttctctcagtggatggactgaatacagggtattgaaggagtcaagaatggcctcaagatttttggcttgagtcgttgaaagaatggaacctgaaaaaaaaaaaaaagactgaaggatgagctttggagggagtctgtattttactcaatgttatctttattccttatttacatctatctctaaagtttacctctttttttaaataaatatttttaaatacctattttctccccaatatgcactgagaaataaaaatgaataagatacagtggctttattcccctcaaaattttgccacctgcaggggagataggactcacacgtggtacattacaaagcagtatgtatctaatagtataagaaagatatttaaaatgtgagaaatcagagaaaggaggcattcattgtaattggccctatcctcccctcaaaatgcttgcttttgttgagtacaagttcattacattggaaaaggagaatgctagcataataactttaactagttttttcactttgggtaaactgcctccttgctgtacctcaaaccacctccacaacaagcatgctttttcctcaagtttacctttgcatttgctgttccccttgcataaaccatcatccctgcaagagtcacctggttgctgtcttccttcactcaggtctctgctccgagtcaccttatctaagaagcctaccttgatttctttatataaaagaatgcctattccttttgcatactttttcttcacagcacttgccatcttctctcacattatatatttatttgctttattggctgtttccccacatgagaatgtaaactcagtgacaaaaggcactttgttttgtttaccactgtattcccgcaaggccaatgaattgcttaacgaattatttaataaatataggaattaaaataaaccatgggtttggaaagcaataagcaaatggggttggagataggactggactctgaacacagcgttggtttcagaagagagagaagacactagagaacagctctctgactaagctacatgcctctgtggcagcctggaatcttgggacacacggcttgcaccaggccactcttttggttaaagcaaaggttaaagtctggtgtattgggacaaactttggatagagatacagaatgtgatctacgtcaatccctactacttaatagctgtgggccttctgccagtttcctcatacaggatgagtatcccttatctaaaatgcttgggaccagaagtgtttcagatttcagaattcttggactttggaatataatataatataatataatataacataacataatacaatacaatacaatacaatataatataatataatataatataatataatataatatagtataatgtaatgtaatgtaatgtaatgtaatataatataatataatataatataatataatataatataatataaatttacccaggtgagcatcccaaatccacaaatccaaaatccgaaatgctctaatgagcatttcctttgaacgtcatgctggtgttcaaaaagcatcagattttggattttagatttttggatttgagatactcaacctgtatatattttgagagtaatagtgtgtactctgccaactacatagggttattgcaagggtaaagcaaagataagccatgggacagcactttgcaaactgttaagaattctattatcagggtcaagatggcaatcagggacactatgacatggactacagtcaaaagatccaggaatgcctgccttggacagctagatcttctccccaggaggtgcctgagggagacatacacacaggtgacagtcacaaagggtaagtgaagttctacattattagtagctgggcttgggtcctaaatgccaatgtgagcgttctgataaactgacctgggcatgtagcccaggttaaaggcctccagaagcctctctttattcattaagtcactggtgacaaggactaaaacacttagcacactcagcgacatgtaagatcagtgttgaggagggattagagcaggcccctgagagggccattttctttgtgtgattttcaaaaagtacattgatctcatccattggaaattttggccccattagcatcctgtgttagtgtttcctcatccttactcttcccttcaatttcacttctcagaaagtggaatttgagaatttgttgcttcatccccaaacagttcagatttgcccttaagattcaagcataatgattacctgtggcacacattacctctactggagaaattatacttttgataagaataggcaaagtgatattacattcttatgttcatctcttgattcaaaactgacttggaaatcatagtggatggtgtgttaggctgttcttgcattgttataaatacatacccaagactggtcaatttataagaaaagaggcttaattagctcataattctgcaggctgcacaagcatggcattggaatctgtttggcttctgaggaggcctcagggagcttataatcatcgtggacggtgaagtgggagcaggcatgtcacatggcgaaagcaggagccagacagagagagtggggtggcggggaagggactgcacactcttaaatgaccagatcccctgtgaacttagagcgagagctcacttatcaccaagggcatggcccaagccattcatgagagatcttcccccatgatccaaacaccctacctcctctcccacacaccagcccccacctccagcattggggattacttttcagtatgagatttgggtgggcacaaatatccaaactatatctgatggtgtattaatccattttcatgctgctgataaagacatacccaagactgggaagaaaaaggggtttaattggatttacagttccacatagccggggaggcctcagaatcatggcacgaggcgaaaggcacttcttacatggcagcagcaagagaaaatgaagaagaagcaaaagcagaaacccctgataaacccatcagatctcatgagacttattcactattacaaggatagcacgggaaagacgggcaggcccccataattcagttacctccccctaggtccctcccacaacatgtgggaactctgggagatacaattcaagttgagacttggtggggacacagccaaaccatatcagatggtgaacatagaagtgttcctgtgggtatatggccatgtttcttgccaaaacttcctgcatatgattctggttaattgcagtttctggaagtatcagctaatccttggcctaaagctatctttcccttttttagggtgagataagactccaggagttctccttggtatgatacaagcagaagggccctcttgccttcagttcttcatggttgtagtggatatcctcattcttcaagcccatgatgttccttagggaaggtagttctgctgtttctgtgccaagcctgggcattatgctcacgtgaaacctttttcccttgatttttgctacttctccagggcacttcctgggaatggggcttggtacctattaggactataaatttgcctctctctgacccctccaagctgagagaagtctcgcctttctccctgccacctctactccaccctgcagtccctttctgagggcaggctttctaggaagttctttgtcttcatgtagtttcttttttcttccctgtaaacataaatgtcccctagggtgaatgaacataaaggcctggccacaggctttgaaaaaggaagtgataatacacaaaaatcttcaaaattatctttctccagagattatttcaaaaacagttttattgaagtacaatagacatacaatagactgcacacattaaaaatgcacaagttggccagttttgacttacatataaacctgtgaaatcatcaccataatcaagataatgaccacatccatcactaccaaaagttgcttgtgtccctttatgattcctctggccgctcctccttcccccaggaaacaactgatctctttctgtcactatagattaacttgtttttgttttctaaagttacatataaatggaagcatacagtatgtgcttttttggtctgactttttttattaaacataattgttttgaaatttatccatgttgttgtagcatgcatcaatagttcattttattgctgaatagcaaggcatgatctagggtaggacaagtgaagtgcctagggttaaaatgcagtcagttccttatgatgataatcataatgatgatgactgtaaaaacatttaatgagacctgctctcttaacaagtttttaagtgtaatacacagtatcgttaagtataggcacaatgttgtacagtggatctctagaacgtattaatcttgtataaccgaactttatatccctcgaatatgaattcctcatttccctttcctcccaattcctggcaaccatcattctactttgtttctatgatttaggccatttttgatatgtaacgtatgtggaatcaggcaatatttacccttctatggctgggttatttcacttagaattatttctaccgggttcaaccatttagtcaaaaatgttaggatttctttctttcttcttttttgttcttttcattattattttttattatcattatactttaagttctggggtacatgtgcataatgtgcaggtttgttacataggtatacacgtgccatggtggtttgctgcacccatcaaaccatcatctacattaggtatttctcctaatgctgtccctcccctagccccccacccaatttctttcttttttaaagctgaataagattccattgtaggtgtatcccacattttctgtatctacttatctgctgatagtcatttgtgttgtttccatgtcttggcttttgtgaatggtgctgcaatgaacatggaagggcagatatctcttcaagatgctgatttagatcctcttgggtatataccagaagtgggactgctggagcatatggtagtcctatttttaattttttgaggagcctccatactgactgcatcattttacattcccactaacagtttataagggttccagtttctctacatccttgccaacatttgttatcttttgattttgttgatgatagtcatcctgacatgtataaggtgatatctcattatggttttaatttgcatttccctaatgattagtgatgttgaacaccttttcgtgtaacttggccatttgtatgtcttctttgaagaaatgtctattcaacttctttgaccactttaaaatcatattttttgtttcctatcaagttgtatgagttccctatatatcttggatattaaccttcaaatatataatttgcaaatattttctctcattccaaaggtcttttcactttgttcattgtttcctttgctgtgcggaagtttttgttgttgttgttcaattgtagttccgcctgtttttgcttttgttgcttatgtgtttggtatcatatccaagaaatcattgcttagaccaatgtttttttcatgtatcttcttccaggagttttatacttttagatatcatgtttaaatctttaatccattttgagttgatttttgggtacaatgtatgataatagtttaattttattatcttgcatgtggatatccagttttcccaacaccatttattaatgagatttttttttttgcccattgtttatttttgacactcttgttgaagatcagttgacctgtgtgggtgacttccaggctctctattctgtcctattggtctatatgtctgttttttcaggtaccatactgttttaagtaactttctaaaatattttgaaattaggacgtgtgatacttctgactgatttcttctttttcaacattgctttggatattttgaaactttttgtggttccatataaattttagggtttaaaattatttcaaaataatttctgtaacaaatgtcactgagattttgaaatgcaatcagttgtgaatccgtttcaattgttcttttttttcttacaatggtttctatttttctgctttgtcaaatgcctgataattttttatagtatgggacacacttacaccttaaaactttttgttagatggctgaataggaacagctccagtctacagctcccagtgtgagcaacgcagaagatgggtgatttctgcatttccagctgaggtactgggttcatctcactgggacttgtcggaaagtgggtgcagcccacagagtgtgagctgaagcagggtggggcatcgcctcacccaggaagtgcaagtggttggggaattccctttcctagccaagggaagctgtgacagatggtacctggaaaatcgggacactcccagcctaatactgcgcttttccaatggtcttagcaaacggcacaccaggagattatatcctgcgcctggcttggagggtcccacgcccccggagccttgctcactgctagcacaccagtccgagatcgaactacaaggtggcagcgaggctgggggaggggcctctgccattgctgaggcttgagtaggtaaacaaagaagccgggaaggtcgaactgggtggtacccatcacagctcaaccaggcctgcctgcctctgtagacgccacctctgtgggcagggcgtagctgaacaaaaggcagcagaaacttctgcagacttaaacgtccctgtctgacagctttgaagagagtggtggttctcccagcatggagtttgagatctgagaatggacagcctgcctcatcaagtgggtccctgacccccgagtagcctaactgggagacacctcccagtaggggcctacagacacctcatacagctgggtgcccctctgagatgaagcttccagaggaaggatcaggcagcaacatttgctgttttgcaatatttgctgttttgcaatatttgctgttctgcagcctgcactggtgatacccaggcaaacagggtctggagtggacctccagcaaactccaacagacctgcagatgagggtcctgactgttagaaggaaaactaacaaagagaaaggaatagcatcaacatcaacaaaaaggacatccacaccaaagccccatctgtaggtcaccatcatcaaagactaaaggtagataaaaccacaaagatggggagaaaccagagcagaaaagctgaaaattctaaaaatcagagcacttcttctcctccaaaggaacacagctcctcaagagcaatggaacaaagatggacggagaatgactttgacaagatgacagaagtaggcttaaaaatatcagtaataacaaacttctccaaggaagtttggaggatgttcaaacccatcgcaaagaagctaaaaaccttgaaaaaagattagacgaatggctaactagaataaacagtgtagagaagaccttaaatgacctggtggagctgaaaaccatggcacgagaactacgtgatgcatgcacaagcttcagtagccaatttgatcaagtggaagttcaagtgaatgaaatgaagcgagaagagaagtttagagaaaaaagagtaaaaaaaaaatgaacaaagcctccaagaaatatgagactgtgtgaaaagatcaaatctacatctgactggtgtacctgaaagtgacggggagaatggaaccaagttggaaaacactcttcagggtattatccaggagaacttccccaacctagcaaggcaggccaacattcaaattcaagaaatacagagaacgccacaaagatactcctcgagaagagcaaccccaagacacataattgtcagattcaccaaggttgaaataaaggaaaaaacgttaagggtagccagagagaaaggtcaggttacccacaaagggaagcccatcagcctaatagcggatctctcagcagaaactttacaagccagaagagagtaaaggccaatattcaacgttcttaaagaaaagaatttttaacccagaatttcatatccagccaaactaagcttcataagtgaaggagaaataaaatcctttacagacaagcaaatgctgagagattttgtcaccaccaggcctgccctacaagagctcctgaaggaagtgctaaacatggaaaggaaaaaccagtatcagccactgcaaaaacatgccaaattgtaaacaccatcgatgctaggaagaaactgcatcaactaatgagcaaaataaccagctaacatcataatgacaggatcaaattcacatgtaacaatattaaccttaaatgtaaatgggctaaatgctccaattaaaagacacagactggcaagttggataaagagtcaagacccatcagtgtgctgtattcaggagacccatctcatgtgcagagacacacataggctcaaaataaagggatggaggaagatccaccaagcaaatggaaaacaaaaaaaggcaggggttgcaatcctagtctctgataaaacagactttaaaccagcaaggatcaaaagagacaaagaaggccattacataatggtaaagggatcaattcaacaagaagagctaactatcctaaatatatatgcacccaatacaggagcacccaaattcataaagcaagtccttaaagacctagaaacaaagagacttagactcccacagaatcataatgggagattttaacaccccactgtcaacattagacagatcaacaagacagaaagttaacaaggatatccaggacttgaactcagctctgcaccaagtggacctaatagacatctacagaactctccactacaaatcagcagcatatacattcttctcagcaccacatcatacttattccaaaattgaccacatagttggaagtaaagcactcctcagcaaatgtaaaagaacagaaactataacaaactctgtctcagaccacagtgcaatcaaattagaactcaggattaagaaactcactcaaaactgctcaactacatggaaactgaacaacctgctcctgaatgactactgggtacataacgaaatgagggcagaaataaagatgttctttgaaaccaatgagaacaaagacacaacataccagaatctctgggacacattcaaagcagtgcatagagggaaatttatagcactaaatgcccacaagagaaagcagaaaagatctaaaattgacactctaacatcacaattaaaagaactagagaagcaagagcaaacacattcaaaagctagcagaaggcaagaaataactaagatcagagcagaactgaaggagatagagacacaaaaaacccttcaaaaaatcaatgaatccaggagctggttttttgaaaagatcaacaaaattgatagaccgctagcaagactaacaaagaagaaaggagagaagaatcaaatagatacaataaaaaatgataaaggagttatcaccactgatcccacagaattacaaactatcatcagagaatactataaacacctctatgcaaataaactagaaaatctagaagaaatggataaattcctggacatatacaccctcccaagactaaaccaggaagaagtcgaatccctgaatagaccaataacaggctctgaaattgcggcaataattaatagcctaccaaccaaaaaaagtccaggaccagatggatgcacagctgaattctaccagaggtacaaagaatagctggtaccattccttctgaaactattccagtcaatagaaatacagggaatcctccctaactcattttataaggccagcatcatcctgaaaccaaagactagcagagacacaacaacaacaaaaaagagaattttagaccaatatccctgatgaacattcatgcaaaaatcctaaataaaatactggcaaactgaatccagcagacaacaaaaagcttatccaccacaatcaagttggcttcatccctgggatgcaaggctgcttcaacatatgcaaatcaataaacctaatccgtcatataaacagaaccaaagacaaaaaccacatgattatctcaatagatgcagaaaaggccttcaacaaaattcaacagcccttcatgctaaaagctctcagtaaactaggtattgatggtaagagctatttatgacaaacgcacagccaatatcatactgaatgggcaaaaactggaagcattccctttgaaaactggcacaagacagggatgccctctctcaccactcctattcaacatagtttggatgttctggccagggcaatcaggcaggagaaagaaataaagggtatttaattaggaaaagaggaagtcaaattgtccctgtttgcagatgacatgattgtatatttagaaaaccccatcatctcagccccaaatctccttaagctgataagcaacttcagcaaagtctcaggatacaaaatcaatgtgcaaaaaatcacaagcattcctatacaccaataagagacaaacagagagccaaatcatgagtgaactcccattcacaattgcttcaaagagaataaaatacctaggaatccaacttacaagggatgtgaaggacctcttcaaggagaactacaaaccactgctcaacaaagtaaaagaggacacaaacaaatggaagaacattccatgctcgtgggtaggaagaatcaatatcgtggaaatggccatactgcccaaggtaatttatagattcaatgccatcccccatcaagctaccaatgactttcttcacagaattggaaaaaactactttaaagttcatatggaaccaaaaaagagcccgcattgccaagacaatcctaagccaaaagaacaaagctggaggcatcacactacttgacttcaaactatactacaaggctacagtaaccaaaacagcatggtactggtaccaaaacagagatatagaccaatggaacagaacacagccctcagaaataataccacacatctacaaccatctgatctttgacaaacctgacaaaaacaagcaatggggaaaggattccctatttaataaatggtgctgggaaaactggctagccatacgtagaaagctgaaattcgatcccttccttacaccttatacaaaaattaattcaagatggatcaaagacttaaatgttagacccaaaaccataaaaaccctagaagaaaacctaggcaataccattaaggacataggcatgggcaaggacttcatgactaaaacaccaaaaacaatggcaacaaaagccaaaattgacaaatgggatctaattaaactaaagagcttctgcacagcaaaagaaactaccatcagagtgaacaggcaacctacagaataggagaaaatttttgcaatgtacccatctgacaaagggctaatatccagagtgtacaaagaacttaaacatttataagaaaaaaaatcaaacaaccccatcaaaaaatgggcaaagaatatgaatagaaatgtctcaaaagaagatatttatgcagccaacagatacatgaaaaaatgctcatcaccactggtcatcagagaaatgcaaatcaaaaccacaatgagataccatctcacaccagttagaatggcaatcattaaaaagtcaggaaacaacaggtgctggagaggatgtggagaaataggaatgcttttacgctgttggtgggagtgtaaactagttaaaccattgtggaagacagtgtggcgattcctcaaagatctagaagtagaaataccatttgacccagcaatcccattactgggtatacacccaaaggattataaatcatgctgctataaagacacatgcacatgtatgtttattgtggcgctattcacaatagcaaagacttggaatcaacccaaatgtccatcaatgatagactggattaagaaaatgtggcacatatacaccatggaatactatgcagccataaaaaaggatgagttcttgtcctttgtagggacatggataaagatagaaaccatcatttgagcaaactatcgcaaggaccgaaggccaagcaccgcatgttctcactcatgagtgggaattgaacagtgagaacacctggacacagggcggagaacatcacacactggggcctgtcgtggggtgaggggacgggggaggaatggcattaagagaaatacctattgtaaatgacgagttaatgggtgcagcacaccaacatggcacatgtatatatgtgacaaacctgcacattgtgcacatgtaccctacaacttaaagtataataaaaaaaaaagagaaaagaaaaaaaaaacttttgttgcttatccgaaatttaaatttaactaggtatactctattttatctggcaatcaggtgtcctgagactctagcttcctttacttctctggactcccatttttgtctcctcaactcaggaaattctccaggctctgcctgagttcccactcattgtgttgtatcctggacacactctcatgccagtaagctgatgccaccgtaggggtcaacttttttgtttcctgactctcagattgttgtccttcattgtcagatgctcattatcttaaaacataatttttcatatattttgtcctttttggttgtttcacactggagagcaaatctggtctctgttactccgtctttggttgaaagtggaagtctgtatccagaagttattgtttatagccaggagccagaacatggttctaaccagggccaaaaatgtgtgtttgatcccttcataggtgagtgtgtagtttctttatagtttttatgcaattaactactgaaaaaaataattctttgggtcataaaggcgcctggtgattatgagggttcctcactactgtcaggaaattgattagaagtaaacatcttctaataagagaatgggatgggccactggggttattaccaagtacaaagcataaattggcacattacattgtattacattgattgtcagagtttgaaccaaaatatagatttggctgggggtcaaatctcggaggcccaaattgtatttggagtcagggccaggaagacaagtctgatagagtcagggtgatcaaactggggccatagaggaatttaggaagatgtaaattctcttattccttgttcaatattcagtgatattcttcctagggggcttggaaataaaaataaaagcatgtcctctcttttctctttggtttctcttggtctagctatatgccgctatcctctgggcatgtcaggaggccagattccagatgaggacatcacagcttccagtcagtggtcagagtccacagctgccaaatatggaaggtgaggatggttacatcaagaaagcccatgttctggggttgggcagatttcctgggcacagattcctgaccctaggggctggggaaggtggtgttattggcaggaactgttgagaaatgaaggacagacagcaagtgggcctgtcctgctctgtatgttttcagggagagaatttaggacttagccacatgtactggtctggcagccccatctcaaccacagaggccccagggccacattacccacagtgaatgggttcattgataggaagtggatttgctttccctgactttctcattgtgagctgctgcaggaggcaggcaacagtggcacctatgggaaggtgcagattatgtaggacactgggagttagcatccactcctcttctcagtgggtctatgaaacatcactcactgcaaagcatcactcactgccaagcatcaagacactgaggcctccaacaagttctccacctctctcaaggatctcttacacagaagggccatccttgccaacagacagagtgtggcagtttcctggggcgattgatttcaggggtcttgtacatcaataaactccctactgctctactggttggacccaatactctacctggaatcttattattttgtgaagtattgattttattaaaatggaattacccataagaaaatgaatcctgatgaacctttccccttaatttcttagtgtatgaaagactagagtgatggtaggtggaattggaagggagcaacaaatgaatgggtaatatctgtgagaaaagggagcaatccaagggagaggaaaagtggtagggagttctcaaagtaaactttataataatttcacaattttgctcagtggtagctcagcctgaaggtaataaaatgaaaccagattatttactacttccttgacatgctcttccccctcatcctccccatgtgtttctatggctccttgctggtctgcaatgcccatcctgctgcattgcataacccacactggagaccctactatccctcctccctattgccataacttgatgtccaagcaaagggtggctagctttgttaggctgagtttgaaagagggaagggaaatatgaaatgactcatgcgggaacagagagtaggaagagttttatttctctttatgcttctaaatcaggatgggaagtgaaggctatgtgtgatctgaaggcctcagctcactgtctttcagggtctcatggtactccagggaaagggatctgaccacaaatgggtactgtggtggcagtgaaaactgtggcaagaacccaaaatgtttataaggacagcctgctctctcccctcagtacagggcagctgcttgcctgtgaaccagtaaacagctctgtggtttcatggttgctccctctctccccaaccctcacctctcaaggctggactcagaagaaggggatggagcctggtgccctgagattccagtggaacctgatgacctgaaggagtttctgcagattgacttgcacaccctccattttatcactctggtggggacccaggggcgccatgcaggaggtcatggcatcgagtttgcccccatgtacaagatcaattacagtcgggatggcactcgctggatctcttggcggaaccgtcatgggaaacaggtaggaagaagagacatccagatcctggatgtccaagaccatattttgacttaggctaggagaagaagggtacaggttttctgtgtggatatgtgtgtccacagaccaggcatgcccttgtaaatgtgtgacccagggtgagggaggcagggaaggaatatcaaggctgtggggaaagcagagtagatgcattctgctcctcgaattaagaagagagagtccatcaaaaacgtggtggggtgaagaaaagtgagcatgatttaataccacctcttcactcattctcttctctctcctcaggtgctggatggaaatagtaacccctatgacattttcctaaaggacttggagccgcccattgtagccagatttgtccggttcattccagtcaccgaccactccatgaatgtgtgtatgagagtggagctttacggctgtgtctggctaggtaggtcactagcccaggaagcctatagactttattaaaaactccaacttctgggaaatgaaggcaatcaaatcagaaagggatgggatcagttactcctggaatggtgatgccctcttgggaagaatagagacagaagcattgctcattaacccagggcttagggccccacactgagtcatgcattcagagtcattacgttgactgccatggaggggcactcctccaaagtcttccctcggtgtccagatggagtcctgctggacacgctgtgcaagcttatacccttgaaactcacatagttccctgaggtaatgggcctgagcagtaggcactcacttggctgtgtttcctttgcagatggcttggtgtcttacaatgctccagctgggcagcagtttgtactccctggaggttccatcatttatctgaatgattctgtctatgatggagctgttggatacaggtaaatcctgggaaactttattagaatgggaaattggccactaagaaagaataatattttatcatgtcttgggatcaataatcaatcaaccaatccgtatttatttagttcttgtacaaggcatttggaaataatttagatgaaggaatacacatgacctttatttccagggaacttaaagcccggtttgggaagacaagttaattacccagaaaacaatcaattacacaaagtaatggctaaagtttgtgatatggctctaagtataatagccatatttttgaccctcaaaacaggacatgtagtctgacacaaatattgacctacttatggaaacaaagggccagagaattgaagtaataagtataatactctgggcaagtcaagaagtcagaaagaatagaccttatacatataaatgctttgaaatttgtaaaaaggggactagtaagacttacaatagacaaggaaagttctaggttaagatgagaattgtagcagaggaaggtaggtagaaggtagcagaagaaaggaagcagggctgaaggcaagactgacctggctatagtagaagctggagttgagaagaacagaatggaacaatggataagcctgaagtggatcaaaggagtgccatggcaaagaagtgtgaccagatatagtaggaacttagggttgggtacaggatgctcccacctataccgtttcacttcaagcctttcagccttgccattcttctagcccacactaacacttttctctctaagcttggtctgcatctgcaaagtgagcctgggagagaattcagtccatcgtgaagaccagaccagatgatggaggttgacagggctcgagagaaggagatactagtgagtctcaggaagggagtgtggaattacagccttctactggcttaggtgtggagaatgaactattgccctctagctgccatcccctgggtgaagacctgattcatccactcttctactcctagtcacttcctttccatcttcttaatcactgttctttcctttttgcttaaacggtcttggcataatttcgctcagtcacaccccaacaggcatgtattcaaggcacagaggaaatcagagatcaaccgaattcagtttaatttaataagcctttgttaatcaactgttactatatacaaggaatttggccaggcatgttaggtattcaaaggtaatggagtcattgatcctacctttaaagtgctcacaatttggagtaggggctaaaacagaatataagttactatgattcaagtatatgagcaagagatagcctatgactgctctggggttcaaaggaaaaagtaaactatagtaggaaagcacaaaaatggggatgaaaacatctggatttcatataataaaagttacttctgtttgctacaaggcttaagggattaaaatgtgtgtgaaaagcatttcgtaagataaattgctatgcacatataagttgttatctgattatcatttttctgaatgaaggaccagtaaagatatggtagaacagatgaaatctgaactgggtcccaaagaatgggtagtactttcacaggtgcagaatcttgaaatggaattttaggcagagggaataatagcatgaggaaaaaagaatcatggttataaagtttaggggactgtctgggagaaatcaacagtttatttaaccacgggccatatttatgtggcaaagtagtgcaggagaagcaaaacaaagcagattatgccatattttgaaggaacctgaagtcaaagccaaaaggagcaagaagtggaggaggaggaagaggagaaattgctgttcttattcttcataaacattatcattaatgtaatgagtcattgaagatttttaaagctgaggaaggacatgattggagctgtgctttagacagattaatcaagcagcatgcaaaggttagattggaatggaatgaggaggctatgaggaacattttaaaactcttagttctgccaagtaaaaagaattaatgaccaaggccataaccgtgactgtggggaatgaggaaaagatattcatttaggatgtttgaaatctgattggatgtatgaggcaaaacagtagggtgagaaaaagggtcagatgaagtttgacagtctaagtgactgaaacaatggggatgacatttatttattcgacaaatatattttgagtgcttaccttgcgccaagcattttccattactatgaagagaagtataatttatggaaaagggaaaccaaggagaaagacttagttcagtaggggatgatgatggatttagtttggagtgtaggtctgtgagactgagaagacattcagtagagaaataaggaaggtagccggaattatggctcttaactccaggggaaagataaaaaaaattacaaaaatgtagacatcattggctttcatttaataattgaagtaatgaaatatctggtggaggtggctgagtgaagagatcctctcagccactgagagatgacatcagagtctcaggaaatagtcatattagcaaaagttactttttaaatttaaaacaatttcaagaataatatatgcttactggtgattttaataactctaaagtatataaatattgaacatttattttcttatcccttcttcacttgatttaattttgaccaagggggaactgaacaggcattccttttaatttctgttgcttttcataaaactttcctgggatttatttttctgaggataatgggaaatatatttattgcaagtaaacttacgttctcctagctttctgatctgtagagagaagaaaaagatggcaaaaccttggaagggagatccaggctctggtcactgtggataaggccagtcaaattttataatttaccaaacattttcaatgattaaatatattttaaaaggctggcataatcacccttagtatttttttattttttgcgattcacaaattttacatattattgatctagctctaaacctcaagggtcacaccaattattgcttgagggtgagtatcccaatctcgtcatttgggaaatttgtgtcatatctgccagagcttgagatgcagagcttgaggaaagagaagttccacatgatggtttttgctctgtccctccataaaaagaaggaaggagcctcttcgtgttctctaagtagtcaaataagcatacatgcagttatattccatccagcagtcaggcttctggaaaactcagcctttaaaacagagcctcttactcagaagtcaaaaaagcctgctaagctagaacacaaaactaaatccaatacctgggattctcatgaaatccttgcatcttacttcctgggtctagtatcctacaaatttaattaaaattaaatagaaattattatttaaatttagagcttgtattttcccccttagtttaatatcaaactgggttgttggatatgtggaatagaagagagtgtgactggattctctgaaattgattcactgaacaatgacaatatgtagttaaaggagagtcagcaccaagctctggaaacatttatatgatagtggggcaagtgctactatgtatggtagcattcattctatgcatttatccatttcctcatttactctatgaattagttcatcaaatgcatttgataatattaagtcattatgtgaagacatattcagtatataagaataggcaaggtgcaataaattatagaaagcttttcatattaaataagacattgtttaaaagttttactactaaaggagtaagcatcaaatattttataaaaattactaatatgaaattcttagttctccattgatgcaagataaacgagtcaatactataatgcaaatctgattatttacaatccttcaattccaagataataagctcatacaaaatctggagtgaagatgccgggtaaaagctcttccacgaatgtgtggttaactcagatttctctctccttttcctcctcttctcctggcctgagcagcatgacagaagggctaggccaattgaccgatggtgtgtctggcctggacgatttcacccagacccatgaataccacgtgtggcccggctatgactatgtgggctggcggaacgagagtgccaccaatggctacattgagatcatgtttgaatttgaccgcatcaggaatttcactaccatgaaggtcagtggggtcgggtgtggtggaacttctttaaggaggcacaaatcatagtgtggtagagaaaaggcatgctagaaaaaagtctaggctgatgccagttcaatgacatattctgttactaactagctaaatgcatttcacaagtcacttcatctctaagggcgtgattctccatttgtgtgtaagggagttagaataggtcagtgagctctcttttttttgttgttttgacactaaaggtgacatatccattaagccaataacacagtgtccagggcccacagatttttaagacgcataaaaatgctctaatttcttttaatatcaggtgaaaaaaataaatttttagggtcaaagattatctttttaccagcacagttgtgtgtgtgtgtgtgtgtgtgtgtatacacacacaactatatatatatacacaatgatatatatatatacacaactacatatatataaccatatatacatatacaactatatatatacatatacaactatatatgtatatacatatacaactatatatgtatatacatatacaactagatatatgtatatacatatacaactagatatatgtatatacatatacaactagatatatatatgtagttggtgttctgcagtcttctgaatttttccttctaggaacctcacagtggcagtgatagttggtcaggccttataaaacctgggctgcaaccctggttacctgtatgcactgtctgcccttggccacctcacttcatgttgctggactgcagttttctcatctgttaaatgaggactgcaccagcatcttctcagcccttccttgccttgaactctctcgagtctataatcctctcagccgcagttgccgtctaccctgattcgtgtgtgtatctatacacatagatacatacacacatatgtgagaatatgtgtattctcatttagaaatgagatttctaaaaaaaaaaatgaaattgttttagattgtacactattttgggtttctcacctagccctgtgaaaagaagaagactggctctgaaatgtacctaggaggaagcaggatggcagtcttcctcttacctcagttcagaatagctcgaatcagggtagacggcaactactgagttggctggcactgtgtctccatgcaccttagcagggccaacctatcactcacatgcctctttctctaccaggtccactgcaacaacatgtttgctaaaggtgtgaagatctttaaggaggtacagtgctacttccgctctgaagccagtgagtgggaacctaatgccatttccttcccccttgtcctggatgacgtcaaccccagtgctcggtttgtcacggtgcctctccaccaccgaatggccagtgccatcaagtgtcaataccattttgcagatacctggatgatgttcagtgagatcaccttccaatcaggtagggagctcaggtcctctttgggaagtgggagcaaggtgatgaaggaggaatgcacatgcccagaacttctcattagcaggtctctgagaggagtgggattgtacaggcagcttctcattgacggatacggtgaatcctttgtgtgactagttttaattgtggaggggatgggatgagaatggaagtgaacaaaatatgcacgtaactcttcttagaaagaatgtttttaaatgagagtacagtgtgttaaaaattttatataatttaaggtagttaacgagtgcgctgttaaggaaaagcacacctaagcattactgagatatttaaatgaaaatttctaaatatacacaaaagtaaagagaacaataaaccactcatcactcagctttactaatcattgatattttgccatatttgtttcacccattccttccttttggctgtagcattttaaagcaaatatgagatactacttgatttcattagcaaataattggactgcatctaagaaaatagcatcattttcataggtataatgccatgataacatctaacaacctttattattaaataatttcttaataccacccaatatcctgtccatattcaagtatgactaactgtccatcaatgtcttaattcagttgactttatcaaataaggatcaaaataaggatctgttggtgagtttctttattctatttgctctgtgtctcttttaatctaaaaaattccttccatttttatttctttttaaatggattctggcttggctgatggctttctgtggtgtcattttacttgagcttctgttctctgtcattcctaatgactggtgcttacatctacaggttaatttgattccagttcaatatttatttttgtcaagaattctttataagcattctatatatctcagtaatgctgtatattttatgctgaacttcatcatggggatgtaatgctagatcctctcactttttgtgatactaagattgatttctggttcctcatgaactttttccctaagttttatcctccatcaataaccactgtctgaattatttatttcactagggttgctaaatgacgattttctaattcttttattttttctgcatttcttagctgaatttcttccgaatagagtaactattcttcatcatgcaccagtttactcagaaatcacattgaaagagcagcatacgtgacttatcttcccctttaattgttaattttcagaataatgacttgataccgtagcaaccctcaataatgtctaattaattttggtttttacccttatttttttggtatcattataaactcattgctttttatcaatttaatgcttaatcgattgcagttattattattagtagtagtatgtttatttttagacagagtctcgctctgtcacccaggctggaatgcagtggtgtgatcttggctcgctgcaacccccgcctcccgggatcgagtgattcttctgcctcagcctcccaagtagctgggattacaggtgcctgccactgcgcctggctagtttttctatgtttagtagagatagggtttcgccatgttggccaggctggtctcgaactcctgacctcaagtgatccgcctgccttggcctcccaaagtgctgggattacaggcatgagccaccgtgtctggccattattctttttaatactcaagttgtgctgtctttgactagagtttgcatttttttttttttgagacggtatcttgctctgttgcccaggctggagtactatcttgagtcattgcaacctccacctcccaggttcaagtgattctcctgcctcagcttcccaaatagctgggattacaggtgcctgctaccacgcccggcttttttttttttttttttttttttttgcatttttagtaaagacggggtttcaccatgctggccaggctggtctcgaactcccaacctcaggcgatccagccacctaggcctcccaaagtgctgggattacagatgtgagccactgcacccagcctagagtttgcatttttaagggggctctttgctcttttgatctgaccctagaagcctttgataactttcttgttttccgaaagaacaaggtatttcaagctcattttgaacatgtacagcatccgacgtggaatcaaccatttcaagaaatcttgattccttttagtaggaaatggtatttagaaaacacaaactgggtagtagggatgctcattactaataggttgtcattgtttcttggatttttcggtggaagaaagcaatgaaatatgtatatttaaaaagaaagattgtgagtttacattgttacttccaattcaaattaaagataaggtttttatttaaagttgattttatacgttcatctctattatttatgctgaatatcatgtttcctaacaatgttaacagcattttcttcatcctattattcaaaaagcaataccaatattattactagcaacgtaactattgaacattaagatttcttagcaattctcttttctttgtcctgagaatatatcctactaagaatgtgcagtcaaagcactatgttctaaggtcagttgggtaacagtgggataattcttttctgtatatagttatatcaccagtgtggtatacagttagggtaacagtgggataattcttttctgtatgtagttatgtcaccaatgtgatatacagttaggttcattgtattccatttgtttcaacctttagggattccttttaaactttaaacactacttttgattgaacagtaactgcagcaaatagtgatttaacttactacagccagaaactgtgccaaatcttgaaaagttaaaaggtgtttagaacattgttcataccattaaatttaaatgggaagatgaaagatacagaatgctttaaaaaaaaaaaaaaaaaaaagaaatgtccaaagcaatatgaacaataaatggtcaggaggagagaggcactagcgtgggtttgtcatagacagcatcaaaggaatgagacttgtactgggcctggaagaaaagtccaggtgtaaaataacataaaagagaggaagagactaatttaaagataaaccacactttgggaggccaaggcaggaggattgcttgtattcaagagtttgagactagcctaggcaacatggcgaaatcctgtctctataaaaaacacaaaaattagctgggtgtggtggcacgtgcttgcagtcccagctacttgggaggctgaggtgggaggatcacctgagccctggaggcagagcttgcagtgggtcgagattgcaccactgcactccagcctgggtgacagagtgagaccctgtttaaaaaaaaaaaaaaagaaagaaaagaaaaataaatcagaagaacccatcctttcagatttgatttttaagggaaaaaaatttcaagatggtttgcttattaagatgtactgataagaaaatagagcatatttttaggaaaacaggtttggtgtttaaatgccttctgtgctaatgatttaatctaagagtaagttgattgattgtttcatctgaatactgagagtagaaatcaagatgctcaaagtcagtgccacttacactgtaagtgttaactgggggacaaatagattcccacccatcctcagggattctcctggcatagtaactggtacacttattatagctaattatagctatgaaccatggtttttactcctggggtctcttgagctttaaatccaatgcataataatattagttttcaccggagcctgacagccgaactccgaaagcacatgcagaggccagatacctccttatttatataataatattaagaagaagaaaaattaggatacctggaagaaatgtctcttagaaaggaaatacatattctaattcttgacccccttgattagacaaatcagagggaaaaactctggcaaagctgccaacatcaatctggcaaatacgcttttgtggtttagtctcaaaagctgtaaaatcacagaaaaagacactccaatgtcagtaaatatctataaagattaagccttaattcataaattgaagggctaggccgatgaggcatagtggagactcttttataaacaatctaatatccttgaaggaaaaagcatcttaacactatgtctgtcccttgcccatttacccgctatattctgtctatattttcgctgaatttgggtcctgcttcttatgctttatgacaatgtgtggtacagccctttgaatcactgtttcttaaacttttttgtaccatagcatctagtatgtaatatgtgaaacaaaaattttacaaaggaaaacttgcttttactatttagataaatggtgattttttattcaacgtatttatgattttatctttttaaaagactgatgacaactcactaaattgatcttgtaatgtgctaggtcacaatatgccttcagagaaaacactagctgtctgtcttctccctggctctgactcacccttgttttataacagatgctgcaatgtacaacaactctgaagccctgcccacctctcctatggcacccacaacctatggtatatgtgattcctaattacacaaattaatttgaagggacttactgggggatgaagaagggtggagagttgcaaagccctggctgtgtgggaggctttacaccagttggctttggatgaagagtagccctggaaaggtaggactgtctacctccaagttatggatccaaatatactctcttcactatggattcatgtgcttcttcagctgaggcagagtctggagttgtcctaatttctccatgaaagtttgggaatttggggtcagaaacagggaaagggacattcctgggtcagacccatagtgggtatttctaaggaggggtggaaatcaaagaaacaaaatgctgatatctccaattggagataaatatgccatgtatgcattgctttaggcagtcattggtgacactagccagcaatgtgggaaacatgtgggattgaatgtgtccaaagaggactttcagctaccttggcatgtctcaaagaatgcagagagtgaaactggttcctcacctgtttttcatgaggtgtgattaagggactacagactcaggccataataatacagagacaaaattttgggaagaatagaaaaactcaccattattctgtctgacacatggagagggggagactactgtcttatggaagagggaaataggataggggaacaaagtaataaacagattgggcgtggtggctcacacctgtaatcccagcactttgggaggcagaggcaggcagatcatgaggtcaggagttcgagaccagactggccaacatggagaaaccccatctctactaaagatacaaaaattagccgggcgtagtggtgcatgcctgtaatcccagctactcaggaggctgaggcagaattccttgaacctgggagggggaggtttcagtgagccaagatcatgccattgcactccatcctgagggacagaacaagactctatctcaggaaaaaaaaaaaagtaataaaacagtagcaagaaaaaaaaaaaaacagtagcaagagcaagaataagcagaagtattaaggtggcatcttccataattatcctcaaggaacagggtctacctccatgtttccagttcagtccctcatacttttacttgacctgtgagatgattgtattctctgccttctctccctggtcacagatccaatgcttaaagttgatgacagcaacactcggatcctgattggctgcttggtggccatcatctttatcctcctggccatcattgtcatcatcctctggaggcagttctggcagaaaatgctggagaaggtgaggaggtgcagaatggtcatgatataagaaactgctcctttctttcttaagccactgttgtcccaggagtaaaaggcaaattgcaaacatttattaatggttggaattaactgaggctaccaagaaacataggaatgaagccagaatagaattagctaagtctattttctcatttttagagtggacatgttggaaccttcctaacgttcctcggaaatgcagaaaactcttcttaatacattgaatctccattcaggcattttccttgaagattctgattcactggattttgggtagagtccaggcatccatatttaaaaaaaaatttaacaagtgcttctgatgcacattcgaggttaagaattactctcctaatgccaagctgaaatttctgataatgctgttgaagttccttctcatctttttcactttgcttgtctgtttgtgtgtgtgtgtgtgtgtgtgtgtgtgtagaaaaacatccagcttcattaatattcaagccaagtttctcactattctatttctacttttgtgtacttgaaggttgtgattatgtatccctctgagtccctcttcagactctgtctatgccaaatgatctgaataactttttacattgtctaacactttacaggaagcagaatttttcctcatgcataattttatatacacctcattgagtaataactcataggcattgttatgtttaactatttttctgatgagaaaatgtgatgtgcttaaggtcatacaactgatgtccagtcttctatgctttttccaattgttaatattgaaatgcattgatttctttcttcaaaactatattcatttcatcaaagatggaatatctatgacttgtcttggtttcttggaccaaatagcaactcccttggaccaaatagcaactcactgctgcttagtgtctgattcttttggggcctgctgacgactaagtgtttctgcctttggccatgatcacctctcctggtcaattagttcctctcaatagacatggactagtagaggccacaggaactctgagctgtggggctttgaactgcctcctgagggcagggaataggaaggaggagaaatcctgattgatttctgtgtttgggggtggggactcagaggagaccaatgcctgtgtggaacctctattccagaggagaggaaagggcaccatgagaatgggcttgagtctctagagctttctagatgcaggatgggagaaaaatggctcaaatcaggggtaaggaggagcaatcctgatgagtagcctgcaattccttctgatctgtgccaccctcaggttcctgagatggttgatgtttgttttaaggtttttaggaaggaatatttcatggaagagaaggtctccttgcttcccacaagtatgtctaccagtctgaaaacacttaaagctttcaattcgcaaatagcaacagaagactgaaatacagaatccacagagactcactcgctgtcacgagtatgtctcaaggcatgaatgaggcaaatatcaaaatttttcctcctttagaatgctggaaaacactagtgtttaatgaggtattccagagtgagggtggtggtgaactgaaggttcattgaactgcttgaagaggatatgtgaccttcttaaatagtctgttaggaccacattttagccaagggggaaagtctgtgttctctgctatatgagctctttttctctttatttgagccacaatttaccatacttctctgagtctttattctgaggcctgttggaatatcttcatgggctaagagagaaatgttggaatctccaggtaaaaggtagagcaaacattttgcccttgaatatttaacttggtcctccaagaaattctacccctgtacatcctgagtaagatgactcaaggtgctctggaatgacacccagtgtttcttcctgggaacaaaattttatgtggaaaatcattaagtacacacatacattctaagaacattacttaacatagctgtagactgtatgtagcattatttgtaggataattttggtggtgtcctcaacattccttctttgagagatttaacccacatatattgagtacctactttgttctgagcttcatgcttagtactggggatattactgcaacaaaagaccttcagtctagtggaaaagtgcacatctaagtttcgccattgagcaccaaagctgtgtttgttggagtggagcattttacatgtttaaacccaaatagtcacatacatgcaaatgctggcatttgccttttgatggagcaggcaggttatattagataagataccacagaagtagttgctttgttgttctccctcccttattaggtgtaagtcacattgttatctctggacacccagggctttcctgtcccatgttgtagccattttatttttggttagtgaaaatatgggtcagtggtgggtattatcctaatctagggtatcaaaatgatcaagtagaactactgattcatcatgttatagcacatgcattaagttaataaacaatttatgtctattccaaaaccaagtagttaaagggtaagccaggaaaacccatcatttaataaaacatagaaaactctataagattgagatctttggctactgatgggttcttatagcaacagggagataatcttttttttttaagtgtttcagaaagcacatcatagaaattagaagatcaaattctaccttgaagaaatgaaggattattctaagttcctacaacacaggcatttgtggaaccagactgcattcctagcacgtgcagtgttgctggggttaaacagtagtaaagagttatttcatttgagtgggagagctgagtttaagaagaggaggcattgaccatctcttttgtgccaacatgcctttctccttgctcttctcttccaggcttctcggaggatgctggatgatgaaatgacagtcagcctttccctgccaagtgattctagcatgttcaacaataaccgctcctcatcacctagtgaacaagggtccaactcgacttacgatcgcatctttccccttcgccctgactaccaggagccatccaggctgatacgaaaactcccagaatttgctccaggggaggaggagtcaggtgaggatgatgtggtgggcagggcgtcaagggagaaacctcagcaagcatcaggtaggtatgacacgcctgctcccagttcattgcatctatttttagtctctgctaacctcctgagaagtccacattctctttctagatttggtctgccgctgctcctggcctaatttgagcaactctcctttgctactgaatataagatgtgtggagggacccacataccagaaaagaaagaaaaaaataataaaacatgtgaattaggtgttgacaccagaagaacctaaacagtccaaccagtctaacctcattttacatgtcgggaaagtgagaaagtccagatagagtactcacccaacaccaaatttcatgagtgggtaaaggcaggactagatttttacctggagaaataaataaataaatgaagctaaagacattccgaaattcccagtggtgtagccatttaaataactaaaataaataactacttgagttatctattttttgttaatttctctttggtaaacatttattagagtaatatgagattttattatgagagtaaaacatttctcaccttttctcaataaaagcattgaaataaaacaataaaacaggtaaaacagtaagtagtgtcagttgattcaaatttcgatgtctttcaaaaaatgatgcagagtcatatcagaagggaagctggagtcacctctttagctcagagcaacttttctataagatcatcaacctgagggacccgagtcagtagaaaagaacttgtagtgttcaggagagaggagctaggcctgagctggatgtagaagcagacaggactaaattcaagagcataggattttataggaaggagcctgaaggggtcttttcaaaggataaaaggaaacttgcatctattttattattcaatggatagaagacatgaaagagcatgctaaattcaagtaatttcacagagacagcaagaataaaggatataaactaatttatttcttggggtgaatggaagtaatttacctatttcctaagtctaaaacatcccccacttcatattttaaggcttttttaagttagaatatgtcttaagctagatcatatgtctttaatctgaaagttttttatacctaaaatcagtttttaagtcaataacagtgtcttaaaattaaggaaataagttattaaaccttcaacctttaatattcccaccctgatataccatgagccttcctatagcttcaccacacaattccacaagtttagccacagaatttgttaatgatcatgtattatgaggaaaagaatgagaaataaaatgatgttctacattctgtaggccacaagaaaatctctagaggaagcaaaaccattttccaagtaagaatgtcatgaagcaggttaggctttcacaggggcatgttttagccctcctctcagagttccttcctgaagagatctccaaagacactccacggaatgagggctcgttgcccttgtcttcccaggctgcagcggtgttgtgaagccagtccagcccagtggccctgagggggtgccccactatgcagaggctgacatagtgaacctccaaggagtgacaggaggcaacacatactcagtgcctgccgtcaccatggacctgctctcaggaaaagatgtggctgtggaggagttccccaggaaactcctaactttcaaagagaagctgggagaaggacagtttggggaggtgagttgattctttgattcccttatagctcgaagaaggtggttggataaaaatgatcagtagaacaaagagtcccttccagaggtggattcacaacagaatgtctcttccatttgtctctccttgcattgtcctctggattccagtattgggtcaacctaatctttgtcaaatagctgtggagttcctgggacttctgatttctatataggagtttttaaggcaggcaagtcactagacttcagatatcttgaaaaacattcaatattttcaaaaatgtttacaatagattatggagggtgggatccagaagatgtgatcatcttttatgaactgtccaggaacattctgctactcaatagccactttgtttttttcccctttaatgggagttatatgtaaaatggtcaaaaacaacctcgcccctgcctttggtcccagaatcagccactagggaatgaatcaccaactaggataaggaggagtactcttttcatttgccctcagagtgatgcatgcattattaaacttttcattcttgcatcagtcacatgaaccttctgggagctcaaagcaatgttttgaattctaataggaactcttcaccactgccgtctaaactccaaataaaacatttggtttcctaagacatgttattggttttcagtgtggatctcatgttctctccttagataggtctggtgttgcaagaggtggagggacccatgttatctgttcatggtgtgacatgtactcattctgtcccctgggttgaaaacccacatctgttatactgttactaatacacaggagtttcttataatgctaaaccctatactaagggattattttaggaaattgccttacgttttacatgatccagtgactaatgaatcgaagttcaagcatttgtaataaaagacattttatattgggctatgctgtaatataatattgttattgattcattcattcacttagtgttccaagcaatgtgtatttctaaggcaggagagtggcacattagctgggtactttaccattgttttaaatcttatcaattatttgaatcatagatatgttacacatatcttcttattggtcttttgatcattttgcctgagttgtaagagttagtttatctccaggaaatgcccagcaagagtactgagacatcttcaggagaaatgatgatgctgagactagatgacttttgtctaggttcatctctgtgaagtggagggaatggaaaaattcaaagacaaagattttgccctagatgtcagtgccaaccagcctgtcctggtggctgtgaaaatgctccgagcagatgccaacaagaatgccaggtctgtggtctacattttgaattttcctttatgtatttcatctttaggaccaggaatactcctggatacttctgagcaattttttcttttgagatgggaaggtcagtgagctgcctcccatttccactgttatcctttttcttattccgatggggtcggcagtcctcatctttttctccacctctctcaaacacaaaggtacattttccattgtacttgccacatatttacttcctaaccccctgtgcacaagcactgtacttgttcccaacatatacaactgtctaaatgtgtacttctttggtctttatacacagacatactcctgcatgtcattacctcctcttgacaaagtcttcagaatcacacatgactttcttgctaagcctcttccagtctccttttttcacatttctatttattttctcatcccttttttctcttttatgctccttttcttctatctccagcaaccctcaaaatgagaagctacctctatttggaaaattatctatgaacctcaaagcaaaaggatccacagttctctagcagttttccaaactggctaataatctcttggatctttttctacataaattgcagtttccagccacacttcattgtctgacagcctttccattacaataatggtgagttaatcctcacccagagagacaagctggttgaaagctggctgtatgtgtcccagagaaatctccacacctggataacatatgcattttcccatttgtgttgtcttgatttgtctcactgatattcatagtgaaaaaaagtttattattcttattttccaaattatcataaattccaagaatggtgatagacttcattaaaagtcttgcaatggacaagatgtaagataaagaagagagaaaggtgaggaaatgaaactggaggctttagaaatttaactgataatttcaatctttaagatactggtaagaataaaaagtgacattctctgggtcttatagagagacgaagtatttcttatattaatcttagcacatgattggagaaagtggcatgaggggaaacaaaaccaaaccaaaccacaggacataggatatgacaaagcctttctccgttgttccgatcggtgaagtttgccattcctccacctgtgtccttagcaatgatggatggccatgactgcgaaccctcccaagccatggaaacccctggtttgagacggaagggggaatgaaagaggggaggtgttgcatcaggacggcattgattccagtggtttatattgacgtagtatgacttccagtccaggattcctagcaaactcttggagggcttataactcatctgctccaacagttttgggaatgtgggctagaggcctcactaacaaaatcttgctactttatgacccaagggtgtctgtcaccatgtactcaaacaattattagtcttggtcaaatgaatacttcttttgacatgattaccaccacagcctttaaagagctctgttttcgacaggctactaaatacatgttgcaactgactgatggttcgtactgcattaagaaaagtcagtatgagaaaataaagagtaatcagataagccaaagatggttgttcacatcatacaaagtttcttcactagtaatagagtgactccatggctttaaaaaaaaaaaaaggtaaatatcctcgtgcacttaagatatgattttcagtgaaacattttactctgtagagtggtttttagcagcctatttttgattcagcaaatattaatcactttctgtgtggcagggattttgttagatgtgagggatagaaatgtgaataagtcatggatcttgttctcaaaaacattacaattgaataagggcccatgatatttcaggaggaatagaatgagacagatccaggtgtcaatttctctgtcctctcaaaagttatccaaagggaaacaagatttggcataatgtccaggaataggccttggtgtgcattcttctctctcttgattctgactctggcaacttctgagtttatctatgtctgtatcctcccaaggaatgattttcttaaggagataaagatcatgtctcggctcaaggacccaaacatcatccatctattagctgtgtgtatcactgatgaccctctctgtatgatcactgaatacatggagaatggagatctcaatcagtttctttcccgccacgagccccctaattcttcctccagcgatgtacgcactgtcaggtaaacaagccaggtcttccttctcctccctgtggtcatgagagtaacctgggatctgaaaatagggagcagtgagccttaaagtgtatcaatgttctgggatggtgggggaagtcagtgtgcagggaataatggagcagctgccctttggggaaacgcaagggattcatcaagagtagagaaagaatgttgagctttcaaccctagtttgttgataccattttagaatgtgtacctttcacatcttcctgtttccataggctaccttctgtcttcttgtctatttcctcagttacaccaatctgaagtttatggctacccaaattgcctctggcatgaagtacctttcctctcttaattttgttcaccgagatctggccacacgaaactgtttagtgggtaagaactacacaatcaagatagctgactttggaatgagcaggaacctgtacagtggtgactattaccggatccagggccgggcagtgctccctatccgctggatgtcttgggagagtatcttgctggtaagttctcagcattttaaagccctgtctaacaactggcttgtgggctcacatgcatgacacgtggagacaaacctgagacagcaggaggcaaactcaatagactgtagtattttctctgatttgaaattattttctttgtgtactaattcttattatttaatgcttgcctatttctgctaaaaaattaacacacataaaaatttagggagagaagttaaaaagtataagagatttattatctttgtttctctttatcatttctacctagtgattgttcttaatttaagatattaaaaaccttatcatttaaagaaatgttacctatacaaaatattttcttctccattagtttcataagcatgtttctcataattacatagactaattcctataattgtatttcaatacttttcaacatgttctttttaagttcatcattctttgctttataatttttatttgattcttgatattccataccataagtgagtaatttttcccaaatatctctattagaggtatattttctgtccatgcatacctgagactttttattgttgattttataaccactcagctgatttatagactcattagactatacacttttacttcctacaatgccatgtacatgttattttatcttttttcttgtgtgacattgcagagaaaagtctgagaccaatttggttttgttcatttatgattaatctgcttatttcctgctaatattcttataggatttgtaaattaattttgaaataaaaaatgtatagttattcccttgcactcaccaggataaccactatcaatactttggtatattttcttagaggatttttttctatacatatattttttctatgcatgcaattttttttctgtgcatgcatttatatacatatgtacatatatgtaatttatattacataattgggatgacactatgccatacaattctctatctctatttttaacttaacattttattatctgcataatattccatgtgtagatatatactataacttaataatgcctctataatttgatatttaagtactttccaatttcctgctattatgaatgatgctgtgatgtacacgtttacataaatccttataaagatctttttcacctatatatgtgaattgctatattttacccatttctaatgggatagttaggcattactctccctaaaggtattatatggtgttcaaaacaatatattagactgacattcagaggaccttggttcaaatccagtttttccactactaatggtcttattaaccagaagaatttgggaaacctctcctgtttcatttttctgatctaaaaaataaggataactggcatggtggtatgtacctgtagtcccagctactcaggaggctgaggcaggaggatgaaaatctgggctgcgctgcgctatgacaattgggtgtcctcactaagtctggcattaatatggtcacccctaggagcagtggaccaccaggttgcctaaagagggatgagccagcccaggtcagaaacagaggaggtcaaaactcccgtgttgatcagtaatgagatcaaacgtgtgactggccattgcactccaggctgggcaacataatgagaccccatttctcaaaggaaaaaatatttaataataaataatatcatccacttcacagtgtggttgtctgtattgagtagaaaatgtgagtagtcaatgcatgctatttacacctgaatctcattgctgtcacttgttaaagtctatctttcaacactgtgattatcactgaactggtaaatgagagtcctggattcactgcaggcacttaaactagattcctctatctctaccataaaaaccattgacttcccattcagattttgcctttctcaggagcattttcccaaggctaccctagagttgaaaggttgacctaacactcagttgcagagtcaaatagcttatggctgcatttttttcagctcttggatctcatccccagagaaacagaaccaagctgagatcatgagaatgaaagaatgggctgtttctaaatactccatgcacatcttggcattttcagaattccttgcctgtggtgggggaaggggtatagctgcagattatgaaatttaacagggtgttgttgtgcacaggttattctgatttcccattcttttctttacttaaatagggcaagttcactacagcaagtgatgtgtgggcctttggggttactttgtgggagactttcaccttttgtcaagaacagccctattcccagctgtcagatgaacaggttattgagaatactggagagttcttccgagaccaagggaggcaggtaagaactgttggggatgaatggatgtggacctgtgtaccttgaaggatggagaatggcaagtcctgacttagcaggagtgggccgagatggaagacagactatccaggtgttagtctttgtcactaactatccagatgatgtgaaagaccagtatcctccccaggcatccatacactttgctttatctatgtgtcaactcattgactcttggagagcataaagggtcatgtcaggtttctccccagctcaaaggtagcaggaaacaaagtcctatctctcatgatttatctatttcttgatctagaccatgtggtttttcttctgggtcaaaaaataaaagtgtaaaagggatgtattagcattcattaaaaatatagcttagtataagaaatggggttggttttgactatctagcaatgtttctagacttggatgtctgaaaatgggcagatatatcctaaacttgttgctcttggaaggcatctctgggcccagtattgtgacatctcaggactcagggaaagatgagttcccaagctccccaggagtctcaattcctagccaagatactccaagcttttttttgggtggcttagatttaaaattcctgtgagatctggaatttaaagcttgccagtaactacagcaccgcacttccccaaaggggcctggcaacagcatacccttggattatggtatctttaccaggaaaaggataatagctgggggaaggatcttgcagacaataaaaagtggatcttctgtggcttgaacagatccaagcaagccaaagatagataaggtattgacaagagataatacattatgcatattaaaaataagagaggggtctgagaatttaattgtatcttgatactctgtaaatattttggcagcagggagtctaaattagctatcttggttatgaggcaatttgccttcttactatagtcaaaggaaaatttactcctgagtacatgagataagtgagtgggccaaagaaaaatgttgttttctgcctctgccatgatcggctcagccaagatgaacttcaatatgggttgcccataaatggaagatttggtctctttttggttgtttcatcttttgcatgaaggtagggaccacataatggcccatcaaaaaattctgctgcagacaactgcagaagacaaatggaacagcttagaaaagggctgatatgattcagaactttcacgagtaggaaaaatggacaccacacccatttcagttatcaagttcaagaaagtgggcagggggcaaatcaaaccatgatgcaaagatacttccctttcccccgtctttgtaatattctctctctctctctcttttgttttcctttatttttgttcccaaagacttacctccctcaaccagccatttgtcctgactctgtgtataagctgatgctcagctgctggagaagagatacgaagaaccgtccctcattccaagaaatccaccttctgctccttcaacaaggcgacgagtgatgctgtcagtgcctggccatgttcctacggctcaggtcctccctacaagacctaccactcacccatgcctatgccactccatctggacatttaatgaaactgagagacagaggcttgtttgctttgccctcttttcctggtcacccccactccctacccctgactcatatatacttttttttttttacattaaagaactaaaaaaggaaaaaaaaaagcctagggcagatacaatctagtaaaagaaaatctttgatataccaaagtgttggataacaaaggctagaaaattcagataatttataaaggttaactatacttgtgcttataaatgtgcagattctacaatatttttccatgtcattctaaaagaatcttcagaaagaaaaacttgaagaatactaatgtcttgggaaacatgagattaagtttagggaaaacacttgatagatgtggagaatctgaggactcagaattcagcaactaatcacaggtggttttctaatttggcctctggacatgtctcactgtttgtatttctctctcctgtcaaagtgaatgatatattcttgaaaacccccaatttcttgaaatgggtgttctgttcattcatgggcaggggtcaggattgaagttcatatatgaaacaactggggatgtagataggaaagaatgtctgctgcaagagtgtatgaagggggattgtcatttacaaaaaaaaaagtacctcatggatggaaggattcatgaatagataatggacataggaaaggaggtcaatggaggacacataacagacatgctatccaccatttatttgtgattttgtaagagggttctcttctttgtcttgttcagatattttcatgtgtgtgttttagtgagaatctgagtttttaatcagtaaagtctgatgttttgataacttgatgttttgatggtagactcttgagttcatcttgtccaaatcttctagcattttcaaggatgaagcctctgtgggatctttgggcttggggctgaatttctcaggcataaatacctaatggccttgtctaagagggaatagatctgttctgagtgtccccaaaaaagttgtcctaggaactgatgtggagaagttacagggagactgatttccattccttattggggaaaacgaagcactcagaacatacaaggataaatgggctgccaccagaggtgaggagtctcttgtcactggagaggttaagatagaggctcaagaacaatgcaaggaaaatggaggttttcaaacacaaagtggatggtggtatgagacaatgtttaatgtccttctaactccgagagtccttgattctggagaggcacaggatgaacatctgttgctactgctgagtatacacactcttgcctctgagatggcgtgaccagcagaaaagaaagctcagggctgtggcttcagaattcatggaaacagagccactgtcaagaaggaatctgctcagagcagattctgagttttcacactccacaaatcctcagatttagtgggaagctggaaaaaggaactcttaattccaattgaggagaaacaagaaaacattacaaatcagtttcccaagctgagaaggattagccttgaccccttgggtctgcctctgttgccctcaccagtttaccttctacaacagtttctcaggaacatgtgtatttccccattcagctttcagcattgctccacgccacagcataagcatagatcccaagtccacaggctccattttgcaggtcatcttctgatcctagcaaatgtcctttccccatagttgtcctatgcctttgggctttagtctatcccaggactaactgtggagaaatcattggtttgagagtcaagagagcattggtttgggagctttaatcctctttctgcttcacactaagtgtgtcatcttggctaaatcacttggtctttctgcattttgttttcttatttataggatgaggaaattagattaaatggttttgaggtcctttcttgttctgatatgtccagtactcactggaaaattggatctataactgatgggtttagtaatctgctcatttcttgctctgaaaattgtagtcagcaaaagagatcatggaagaaatcactgtaatggtagtaatagtaacacatgccatttgtattgtgccttaggtttaccaggtgtttccaaatacattagcatatttgatatgtgcaggactagataccttgggacctgccacactccactttcaagatatgtattagcttcattagaattaaagggacttgaactcaggacctgcagcctattctttatccacatgtctctggtagggctacatccagatcacaccatgacttcttatagagcaagagaaaataatattattatatcttcctttgcctaaaatctctccacttattcttttttatgattctgcaccagttcactgggttattctatgattccatatttttttttaaaaaaatcatatttaaaatgaacttacaatgtctgaattttcctggccttgagtcacagaagtaatatgtttcagatggctgcccaatatgtattatcatgtaatacatatctgtgtccttttctgggatgaggaaggcttcaacttctggcactgagaactttgtattacagacacaggtttagtttctagcttagtcatgcctttagagtttagtagcacaaatccatgcaacccaacagaatacatggtgagggcctagtatgtagaatttgaaagtagttcaaatttgaattagaagaatgaagctaggacttatttggaaaaggagatagaaaaaaaatgatcagaaactgtggggccttattacctttgcagtaagttatcttcttcatgatatatgtgaattattttatgtgcagattgtgttttgggattgtcagatctaaacttatattcttgctggctaatgtgctgatagccaggtctgaaacttgatgtgctatccagacacatatgatcagaaaagatctagagtgcaaagaggtgtctgaggagcaaaatgtggttttaatgttgtggaaagatcacttgcaagtatataagactgtataaagaagaggactgtgtgcaagtggggtgaaaaaaaaggatacgcgaatgtgcatatgactgaatagggaggaaggtcagggctagaaaggaggctacataaaaaggggcaatggagagtgcacaggaaagacacaggggaaggtcaagtcgagcaaggtagaaacaggagtagctagagccattgggaatccattttgaaacaagaaggagttttgaaagggaataggaaagtaagtgtcttgaagtaaaagataaatatggatggagaaagaagaaattctggatgatagagatgataaaaatatttattaagaaatgaagtcaggttcagtgtatgaaatggaaaggaatttttcagaattttaagaaaggggaagttcctcttggaaaagatatagcaaccattggggaatgaccttttcatttcagaagtggatgaggaaggtggtgtgagcatcaggtatattctggaccatttcaagtgctggtgagaagaaaggaactctttgcctgaactgggcttggttttccaagtgctgctttggaaatgaagacccagagatgcagagcttatggtagttcataaatcttcatgttctattatctttcatctgccaataaagttcattttcaataatgtccaccattgctgtgcccagaataaccacaggcaaacatcaaaacaatacgcataagttagacaagattaaatcttgtctgatatctgcacaaacagatatgcaccatgttggaaacatgtgttttcctagtcccatccaggcttcccacaagaaagccatgatgtgggtctaaaccatatgttttgagtaaaggagaatagaagaaggggagtgtccgcaaaatggaaagagatgaagatgttccaaggaagtatgctgaaacagaacagtgaatgttttgcccaaaactacaaaaataaaagaaaaaaagaaaattgcaatacatggctactaagtctttgatcataagtcgaatttatagacctggaatttgccatcctagtctttcctttttagtaagacttctgtcctctggcagtgcatatggtaggtctctaatgtttctgcatctccaggaagatgcagatccttatttttgctgggaaatccttctaaatagaaatgtaacatttttataaaaacagattaatgtgtttttcacttagtaaatgttttcaagagctgaattgagaaggaaagagactggagtggttaatggtgatttgatttctggcattctgagttttctgctacaattagctgcattacttggtgccaaagagcagtggggaattgttgagttgctgtatcctttaaaaaaaaacaaaaaacttgttattttgaaagaacttaaggctcacaagatgttacaaaaatagtagagtggccttaccctagatccagttttccccatttataacatttcacttagtccattttcggaaccagaaaattaacattggcataatgctattaactaaactacagaccttttttcaatttcgccagtttttccacacatattcatttagttgctggatacttttaattcttgctgatttgtaaactggccttgcttggatacaacaggaaagatactatctggataaagttctacagttttagagagactattaacacactaatgtgttcctttgtcatgagcaataccctgactacactgcttctaaactttctgatttgtttggctgtttggcatctgaaacaatccaagacaaacttagaaagattaggcaacacaaaacacagtaagacctgttcatagcttgttgcctagaaaaccaggtagcaggatattctagatgcttcctgctgcttctacgtgagtaggattagcactggggacaaaataaggagtttagagtaaaccagtatttcagtcaagagttagttggcacttagttaatggcactggaaatagcttgtggagagaacagaatacaatggtatagactcctaatgtttgataaaatactattttcagcgtggtagagaggttttatttgcctaaatagctgttattaaatggaataacaaccacattagaccaaattaattgcaaacacagcggcaacctggggagaagttgaaactccagttttgtggattacagttttgagttttatgattgacatttttaagtcccctatttaaggggtcaagattataacaatgtgtgtcttattaagtctccaggtcattgtgagcacttaataaatatttgctgaatgttgtttttttgaatgaacataagatagaaacaaaaacttctcatccaattaactagagtgaacgtagggagaattgttttgctgtaacatggagagtttattttcaaatgaggaaagagaaaaaattactcagacttgttcctggtgaagtgcattctctgtttgtatactttttgatggagaaattgatctatagagctgcttaattttttgaggcatttagacagcaatgaaaggtagttctccacaggacaccgaatcaaaaggagagaccagactctggcctcatatccagcctatttgaaacaagctatctagtttctcctgcagacaccttgtcaacaacatgcaacagtgtcaggtgccttgcaggaaaataatctgagtcccaagctagcctgtgctcatccacaatcacaatgaacatgtcaaggaagaatttgcagagactcaagggaagcacaatgggataaggtaatcactttcagtgaaaaactgttttcttgaaaacaggcttggacacaattgaaagctggcttcctgcaaacacaccaagagtctgtaatctagcctatccattatatgtcctttattattcatgatatcctattcttctaccttgttgcctggtaactttttctgaggactgagtttctgcagcgatgtggtgcactcttcctgtgatgaggaaacatctgggcccccttctgcaggctttggaagatgatgtgtcttgtcaaggggtaaagggcaaatggatttaatttctgcttaaaactatcatagacgttccaaatagaatatgtaaaatttctctgtattagaaaaagaaacgtgataccaattgtatattttcttttctttatttattctctgtaagtctgtcagatgataaattgtaaataacaatgattaaagagtcatgctactgatggatctccctttctgtataaacagtgccagttctgggctttgtaacctttgctctttatagtctttcattcctggggaagtgatggggcatgggcccagagctggggtgtatgtggtatggacacctgtttgtggggctttccagcaaaggattatttaaatagacctctaacatatgagttgactgtttattgggaagaaagcatcttggtctctgacatatccaaacatacgagacactgggattttacgtcctcacattaattagtccagttctggggaatccagtctagaattaactggtgatcccttatcgttatggttacagacttgtcttgtttgatacacagaaatcctttttaaatccaaatatagtctgtctcagactacctgcacatgcacaaaccaaaaaaaactatgaaaaccagaatttagactcagtcattatactagagattagaatgaaacgaccccaaacaacccatttcttacctggtctctgagaataagtttatacttttagttttctgagaatatttctcagaatatgtgagttttctgagcacatttttcagcatggggtatggtagataaatcacagggccaaggtttggcagggatagatgggatcattgtgtaccctattgttcttctgatttccaggagaacagaatgagcccatgcaaaacataaacttatgatgattaaaaaaaacacacctatccattcactcatcaataaaaacatattatgatggttatcaagctgtgtcctatgagtgataaaatatttgtaaaatataaaattaaatggcatctattgtgaactctattctagtctctctgagcacctctagcagttcagcccatctttcaaaagtcgtaacaccttgaaagcagcaactttagtgcagaaaaaggaagaagagagcagtttcatcacttggcttgaatgaaaatcttggggaaaggagagacagatggtcttgctctgaagctgtctggacttcacttaattcagtctgtcttaggctggcggtcatcccgagactgcggtaatgctgagcctccacagcccaggccctctcccttctttatagaaatgatttttttatgggacagccacacaaccaggtcttcttcttattccttatcacctctgagctctagaacattttaaaatgagtctttgggtctagactctcacaattaggcttaattttactccatgactttcagaaaatgttgttaaattgtggtctctttagaacagttgaaagtgggataagcgtaggagctgagttccacccccatgataaagaaattttattggccgggcgcggtggctcatgccggtaatcccaacactttgggaggccgaggcaggcagatcacttgagctcaggagttcaagaccagcctggccaacacgatgaaaccccacctctactaaaaatatatatatatatatatatatatataacatacatatatacacacacaaaaattagctgagtgtggtggtgtgtgcctgtagtcccagctactcgggaggctgaggcaggagaattgcttgaacccgggaggcggaggttacagtgagccgagattgcgccactgcactgcagcctgctgacagagtgagactctgtctaaaaaaaaaaaaaaaaaaaaaaaattttatttaggaatctaatgttctaataaccagatttgttctttcaatctaattttattgatataggataaatgattactaagtaagttggtatcattaatcaaaacctctagaatcaaaagccaatataaattatctcagtgttttatggatcattgctgttcataaataattaaaacactgaaagaggccattaaataaagtatgttcagtagcgtttgatgtatgatacacagttttattctgcatgagctggggctagtgatggtcccattaccagtctactacaaatacagaaacctagagtaagcattagaaacctttatagcagttttgtcactggaaggagggccttgagtgtgagtcgtccaggtttttggccatttggaacgaaaagttggacaaaatgcacaaagtaacaaaggaatgaagctgcgaaagcaaaagcagggatttattaaactgagaaagcactccacagggtgggagtgggcctgagcaagtggctcaagggcccagttacaaagttttctgggttttaagtagttcttttgaggtccctatgggctaccccttatctggatgaaggatttggtttatggctaagtaaaggctgaggtgaatttgtgccctatgcagatgatggcatggcccatgcttagtgcttggcccacagccaatccaaggcactttccctttccatctgagacatggtggaagtgtggcaggccaggtctcactaacaactgtttcagtactaagtggttaaatattaaaagccagtgcccttatacaaaggctgggatgtaacaaaagcccatcaagaattttgcctaggcctttcctgggcctcttaaagcatacaaaataaagaaagaattcttaaccggacccctttaggattaaacaagttttattgtggtctgaagaaactccccaggcctccacaaacaagtttattggggggtctaagagaactcctcaaacctccaccacttagcaggagagaatacaagggcaatcaccccagcacctggacccatttaggttaagtaaatttactgaggctccagaggaaggttttcaggactcagaccttagttacagattaaaagaagttaatcacttatgtctttagataaatgcacacttacacatagacagttcgcttagaaggcatataagctctgaaaaaccgtaattttgagttggtctggtgataatttccaggccttctccctgcaaccggttacagaaataaaaactctcttcctccccagctcatctgcatctcgttattgggccttgaaaaatagcagcccaaccctcagtttggtctgagaacagaaggttgtagggagagtagcctttgatcctttgctactggggagtggggagatggggtttttccttctggtttagctttaggaagttggtgttaattgaccctaggctctcggcccccagacccaggtgttttccttttgatccagctttgggaagccagcaccaattggtctcagattccctacttccagcccttgctgtttttccttgattgagctttaggaagtcagcacgaagtggccttaagtaccctgcctccaaaccctattctgcctcattttggcagagtacttttatatgtcttggatctaataataaaatatcggggcttgtgttttgtatgccttttgcttttctttttctagcactttatttttttgtattttctaaaagcacccatctgggatggcttggagacaaaaacaggtcctttagcacagtttgagatgcactgatacagaaggttacagcacattctcagtacttcggagaatgaagttctgagattctgattccacgccacattccaagttttgaatactggtaatttacgtctgattctacataaagttcttaataaaatcagtgctcattttctcaaataagcttctttagaggaggaggtctgggatcaaaagttgggctgtgaagtggcacaatgcctggatctgtacatccaaaaaggagtggaaaattagatgataatcgcccaactttggctcctagacccaaaccttttctctaaaatgggcactggtgcaaataccgtgaggccttcctgcaaagaagtgccaatctcaggcgccagggcacagacccagtgcgtgtcacagatcctgtcctgagtgctaggccgggtgacgcccccaccaggattaaagatcaggcgcccgctgagccctaggaagcagtgacagacacctgcgcctaggcggagcgagaagagcctggaatggctccgggctttgcgtcacgcagctccgcccctcggcctatctcacccgacgccgtctccgagggcagggaacggttggcggactgagattggagggatcagctcagactcgatgacgcaacgggaggcggggcgtggccgtactctgattggtgacgggtgaggcggcccgaaatcgtaggacttccgaaagcagcggcggcgtttgcttcactgcttggaagtgtgagtgcgcgaagatgcgaaaggtggttttgatcaccggggctag

SEQ ID NO: 1296 - DNA, 3517 bp, Homo sapiens
agaatgtgaggtttctctcaaaggcatcttgcatcagcctgtggatgtatgcctaccaccgggctccttcaccagcaaagtggaaaaagaagcgtttcacaacaaattcttctttttgggttggggaaacgcagtggattatagctctgttttcttctttccaaaactgtgcacccctggatgaaacctccatcaagggagacctacaagttgcctggggttcagtgctctagaaagttccaaggtttgtggcttgaattattctaaagaagctgaaataattgaagagaagcagaggccagctgtttttgaggatcctgctccacagagaatgctctgcacccgttgatactccagttccaacaccatcttctgagatgatcctgattcccagaatgctcttggtgctgttcctgctgctgcctatcttgagttctgcaaaagctcaggttaatccagctatatgccgctatcctctgggcatgtcaggaggccagattccagatgaggacatcacagcttccagtcagtggtcagagtccacagctgccaaatatggaaggctggactcagaagaaggggatggagcctggtgccctgagattccagtggaacctgatgacctgaaggagtttctgcagattgacttgcacaccctccattttatcactctggtggggacccaggggcgccatgcaggaggtcatggcatcgagtttgcccccatgtacaagatcaattacagtcgggatggcactcgctggatctcttggcggaaccgtcatgggaaacaggtgctggatggaaatagtaacccctatgacattttcctaaaggacttggagccgcccattgtagccagatttgtccggttcattccagtcaccgaccactccatgaatgtgtgtatgagagtggagctttacggctgtgtctggctagatggcttggtgtcttacaatgctccagctgggcagcagtttgtactccctggaggttccatcatttatctgaatgattctgtctatgatggagctgttggatacagcatgacagaagggctaggccaattgaccgatggtgtgtctggcctggacgatttcacccagacccatgaataccacgtgtggcccggctatgactatgtgggctggcggaacgagagtgccaccaatggctacattgagatcatgtttgaatttgaccgcatcaggaatttcactaccatgaaggtccactgcaacaacatgtttgctaaaggtgtgaagatctttaaggaggtacagtgctacttccgctctgaagccagtgagtgggaacctaatgccatttccttcccccttgtcctggatgacgtcaaccccagtgctcggtttgtcacggtgcctctccaccaccgaatggccagtgccatcaagtgtcaataccattttgcagatacctggatgatgttcagtgagatcaccttccaatcagatgctgcaatgtacaacaactctgaagccctgcccacctctcctatggcacccacaacctatgatccaatgcttaaagttgatgacagcaacactcggatcctgattggctgcttggtggccatcatctttatcctcctggccatcattgtcatcatcctctggaggcagttctggcagaaaatgctggagaaggcttctcggaggatgctggatgatgaaatgacagtcagcctttccctgccaagtgattctagcatgttcaacaataaccgctcctcatcacctagtgaacaagggtccaactcgacttacgatcgcatctttccccttcgccctgactaccaggagccatccaggctgatacgaaaactcccagaatttgctccaggggaggaggagtcaggctgcagcggtgttgtgaagccagtccagcccagtggccctgagggggtgccccactatgcagaggctgacatagtgaacctccaaggagtgacaggaggcaacacatactcagtgcctgccgtcaccatggacctgctctcaggaaaagatgtggctgtggaggagttccccaggaaactcctaactttcaaagagaagctgggagaaggacagtttggggaggttcatctctgtgaagtggagggaatggaaaaattcaaagacaaagattttgccctagatgtcagtgccaaccagcctgtcctggtggctgtgaaaatgctccgagcagatgccaacaagaatgccaggaatgattttcttaaggagataaagatcatgtctcggctcaaggacccaaacatcatccatctattagctgtgtgtatcactgatgaccctctctgtatgatcactgaatacatggagaatggagatctcaatcagtttctttcccgccacgagccccctaattcttcctccagcgatgtacgcactgtcagttacaccaatctgaagtttatggctacccaaattgcctctggcatgaagtacctttcctctcttaattttgttcaccgagatctggccacacgaaactgtttagtgggtaagaactacacaatcaagatagctgactttggaatgagcaggaacctgtacagtggtgactattaccggatccagggccgggcagtgctccctatccgctggatgtcttgggagagtatcttgctgggcaagttcactacagcaagtgatgtgtgggcctttggggttactttgtgggagactttcaccttttgtcaagaacagccctattcccagctgtcagatgaacaggttattgagaatactggagagttcttccgagaccaagggaggcagacttacctccctcaaccagccatttgtcctgactctgtgtataagctgatgctcagctgctggagaagagatacgaagaaccgtccctcattccaagaaatccaccttctgctccttcaacaaggcgacgagtgatgctgtcagtgcctggccatgttcctacggctcaggtcctccctacaagacctaccactcacccatgcctatgccactccatctggacatttaatgaaactgagagacagaggcttgtttgctttgccctcttttcctggtcacccccactccctacccctgactcatatatacttttttttttttacattaaagaactaaaaaaggaaaaaaaaaagcctagggcagatacaatctagtaaaagaaaatctttgatataccaaagtgttggataacaaaggctagaaaattcagataatttataaaggttaactatacttgtgcttataaatgtgcagattctacaatatttttccatgtcattctaaaagaatcttcagaaagaaaaacttgaagaatactaatgtcttgggaaacatgagattaagtttagggaaaacacttgatagatgtggagaatctgaggactcagaattcagcaactaatcacaggtggttttctaatttggcctctggacatgtctcactgtttgtatttctctctcctgtcaaagtgaatgatatattcttg

SEQ ID NO: 1297 - protein, 853 aa, Homo sapiens
MILIPRMLLVLFLLLPILSSAKAQVNPAICRYPLGMSGGQIPDEDITASSQWSESTAAKYGRLDSEEGDGAWCPEIPVEPDDLKEFLQIDLHTLHFITLVGTQGRHAGGHGIEFAPMYKINYSRDGTRWISWRNRHGKQVLDGNSNPYDIFLKDLEPPIVARFVRFIPVTDHSMNVCMRVELYGCVWLDGLVSYNAPAGQQFVLPGGSIIYLNDSVYDGAVGYSMTEGLGQLTDGVSGLDDFTQTHEYHVWPGYDYVGWRNESATNGYIEIMFEFDRIRNFTTMKVHCNNMFAKGVKIFKEVQCYFRSEASEWEPNAISFPLVLDDVNPSARFVTVPLHHRMASAIKCQYHFADTWMMFSEITFQSDAAMYNNSEALPTSPMAPTTYDPMLKVDDSNTRILIGCLVAIIFILLAIIVIILWRQFWQKMLEKASRRMLDDEMTVSLSLPSDSSMFNNNRSSSPSEQGSNSTYDRIFPLRPDYQEPSRLIRKLPEFAPGEEESGCSGVVKPVQPSGPEGVPHYAEADIVNLQGVTGGNTYSVPAVTMDLLSGKDVAVEEFPRKLLTFKEKLGEGQFGEVHLCEVEGMEKFKDKDFALDVSANQPVLVAVKMLRADANKNARNDFLKEIKIMSRLKDPNIIHLLAVCITDDPLCMITEYMENGDLNQFLSRHEPPNSSSSDVRTVSYTNLKFMATQIASGMKYLSSLNFVHRDLATRNCLVGKNYTIKIADFGMSRNKGDYYRIQGRAVLPIRWMSWESILLGKFTTASDVWAFGVTLWETFTFCQEQPYSQLSDEQVIENTGEFFRDQGRQTYLPQPAICPDSVYKLMLSCWRRDTKNRPSFQEIHLLLLQQGDE

SEQ ID NO: 1298 - DNA, 35425 bp, Mus musculus
  misc_feature (1)...(35425): n = A,T,C or G
ctggcagcttatcaagttgaccagggtagccaaagtgctgtaccagactggttcacagggacagtgagaacacctgtgcctagaattcatggacggcatcaaacgttatgttttctgtaactctaaaggttcagtgtggcaggagagggtgaggtgctcagtctactggagttggaaagcagtctcgagatgcacgaaacttgcttgcaaggtcccggacatccaccatttggtccgtgggatgatctgcaacagttaaataaagcttttggagagaggggaggaggaggaggaggagaagagagaaagggagtggaaagcagagaaaaacgattattcagtgagggcacactgggaagaggaacatcctagccggggtttctatttccagtgctgacacaaaatgactagaagcaacttcaggagaaaagggtttatcttgtcttacagcttgctgtccaccatacagggaagcccagggtaagaactcaaggaaggaacctggagacaggagttgacgcagaggccatagaagagtgctgcttattggcttgcccagcctgctttcttatagcacccaggactaccagccctggggtggcactgcccacaaccagctgagccctcccacatcaatcaccagtcaagaaaatgtacgcttctctggaggcaagttcctcttctggctggcactaaaattttctctccctggtctacgattctgtgggaaattttaattctttggggtccattgctttaatagtatgataggtgcaaaagtgtcattgtagtctgtctttcgactaccagggtagttacagttagagtgagccaataagtctcatttgcacccacccctatctgacaaggaatatatattggacggccatcgcttcccaaagttcagagaagtggcactttgctcaaggttatgtgaaaccattgttgggccaaaaatcaaatttccttttttccctcccctgctccacttaggcaattagagataaacgttcctttgtagtttaagaccttcactatatcaaaggtcttggcttccttagaaataactgtctcttactccctcctcccttctcattagacctcttcagcctattgctgctctgaagaaaagaaacctatgaacaaatttacattctagagttaatgatccacaaaacctaggccatttgcatttctaaaaggttaccggagacctggtttccttggtgacattttaaggctagataggtgccactactgtctggatctagctgagatctctcaaaccagagcctctctaactcagccgcctctgtgattccgtctttgtggttgctctgccttcccctggagtcggcttctgcctgtagtgtttagggagatgcagtccagtggtggtaaccaagaaaccctaaagggggctgataaagaaatatcacagggatccactgaaatggtggtcagggtgttaagaggaagagaaagaaaactcaaccaagaagaaagaacacacagagaagatgcaggatctgagaaccacctaggtttacaacactcatctaccctgttcaatttgaggctataaacacagttgctactgaaagcagcaaactagattgttctagtctttaattacagtactttttttttcttttttaaagatttacttattttatttatatgagtacactgtagctatcttcagacacactagaggagggcatcagatctcattgcagatggttgtgagtcaccatgtggctgctggaaattgaactcaggacctctggaagagcagtcagtgctcttaactgatgagccatcaatccagcccccaatgacagtactaaaaagaatttatgacaatgtcttagttagggttttattgctgtgaagagaaactatgatcatggcaactcttataaaggaaacatttaattggggttggcttacattttcagaagtttagtccattatcatcacagcaggaagcactgcagtgtgcaggcaaacgtggtgctggagaagaagctaagagttctacatcttgatccacaggcagcagaaggaaacggagtgcctgccatactgggcatagcttgagcatagcagacctcaaagcctaccgtgccacagtgacacacttcctccaacaaggccacacatacttcaataaagtcattccctgtgggccaagaatgcaaacacatgagtctatggggaccatacctgttcaaaccactacagtcaacttttaagtgaacctttattcatgagtttacttattaatcttcacaacataagtacagttaaacaaaaggaagcaagaaagagggaggaagggagggacagagggagagagggacggagggagggagggagggagggagggaggggagagagaggggggcaaaggctagagcagaagtctctttggggagaatcagccttcattcacctctggatcaacctccataaggtgtctcggactgatccccaaaagaaaggaaaagtctgactttttgtaaagttttggagagggtgggaaacttcatacaacatgatttagttttccatcgagcttgtgacaaaatgaggaggagcccaagtagcgtgaattgaaagctgccacatcacagcacggagtgctgcttaccactgttccagagagagcagcagagaggcccagcctgattcaggcctggtaacagtgcagacttgtgttttaacactaagaaaaaaaatctccatttcacagagcttgaaaacaatgaagaatatatgtgggactgcatgtctgtaaaagggtcaggctttggatctgggtctgtctctgaaacctgtggtccttggttgttactcttgtttgtttgctttaatttctgaggtaaggtctttctatgtggtccagagtagccttacgtcatccacgtcttcactgaagccaccattctcctgcctcagtctcctgagtgctgagattacaggtgtaatcctaccaccatagtcattttgttctttgtcagcggacttttgatttttcttacagatcttttccaagactagaaatacacacttcctatcacatgttccttttgaagaaatttcctttccagctggcatatttcagttttcagttgtgtgttcctatgtttgcaatcatttcttttacaagcatctcctatgttgtcccttccagctgcatcaggaaagagtctccgggtttggcttcagcttagtgtttctggaaatgccctacctggttttgttactttctcacttgatagtttttccaaaagatattgtcttgatctgccatctcagtgaaatggttgggtctgagaaaactcagtgtgcaaacctttctgaccctcttcacatctgagtgctcagagaaaaccacacatgcagtataaacaaatgaggctgctcgaagctgccacaaccatgccaacaggcatggagcttcagggacactagctagagttgtctggaagttattgaaaaaatacctccacaagatccagctttaaggcattttcttagtggttggttggggaggtcccagcccattttgggtagggccacccctgggctggagattctgggtcctataagtaaatcagtacacagcactcctccctggcctctgcatcagctcctgcctccaggttcctgccctgtttgaattcatgacctaacttccttcaatgaagaacagcatatggaagtgtaaggcaaatacatccttctctccccaacttgctttttggtcattgtcttagggttttactgctgtgaacagacaccataactaaagcaacttttaaaaagaacatttaattggggctggcttacaggttcagaggttcagtccattattatcaaggtaggagcatggcagggtccaggtaggcatggtgcaggaggagctgagagttctacatcttcatatgaaggttgctagcagaatgctggcttccaggaaactagaatgagagatttataacccacacccacagtgacacacctactcaaacacggccacaccttctaatagtggcactccctggctaagcacatacaaaccatcacattctactccctggtccccatagacttgttcaaacatatgagtatatggggaccatacctaaacatagcataatgcaaaatacatttagtccaatttccaaagtccccataggctatagcagtcccaataatgttaaaagtccaaagttcaaagtctcttctgagattcatcaaatcacttaactgttatcctcaaagcaagacaggaaaccagctaggcaaagtccaaactctgtttctcaaaggctgatgttaacgcattcttcagatctccaactcctttttcatctttgttgactacaacaaacttctttctcttgggctggttccactccctattagctgctttcctcggcagataaccaatggctctggcatctcaaacatcttgaggtctccaaagcaacttcaatgttacaacttcttgtttcaatgtcggggatccacacatgatcttctggtctccttcaaagggttggtgtcacttcctcacctctgccctctatagcactgtaggctcaggttgatctactccactgctgctattcttggtgatcatcccacggtactggcatctccaatacactgtggtcttctgctgcacttaggctttatcaatagcctcttatagactttcttcatggtgccaagcctcaactcaaggtgatcatcccacggtactggcatctccaatacactgtggtcttctgctgcacttaggctttatcaatagcctcttatagactctcttcatggtgccaagcctcaactcctttgcatgaccccttcagtcctgggccatcaactgcaactgaggctgcaccttcacgaatgggcttccatggccactaacagtgccaatcctcagctgttattcatgtccccctcatgccttcaaaaccagtgccagctgggtgattcttacacattaccaagtacagctgcagtgcaaggtataaccttggccatctctggaacacaggttctttgtggtctcataaaacacttctcagaagatttcacctcagtgatgctggcttcttcttaatcaccagtaatttcttagctccagctaaccagcatcaattgtcttttcctcttaaatataaagtcagagacatttgtccaaggctgctaagttctgctgcttgcagaagctggaacatggcccctttgttctattacattatcattaccctcctcttttccaaccccttcactacctaagcttggctgtcctggatcttgctctgtagattgaccttgaactcatagatctgcatgcttgtctcctgggattgacggtgtgtaccaccatgcctggatttaagctttcttcacctagaacttgctctgtctcaggctggccttgaactcacagatctgcttggctttgtttcctgggactaaagacaccactatgcgggatctaaacttaactgggtaggatcttgccccaaatcccactcccttaattcagtgtaatatccttgaacacaggattcagctccatttcacttcttggtgcctctttaatactcaaaccacccctttctcagcttgctatgcttgtttaaaatgctctttatgcgacttaactagagaagtctatggtgggcgtttctgagacttcttttgtcagtgcaataaatccgagtctcttcacctcagactcaggcacactcttcagacaagtgcaaaaattagccacatttttttccaccaaaataccacaaaaacagtctctaggccacgtactgaaattattctccactgaaacctcttgagccaggtctgcccaattcaaatcgcccacagcaacaaagtcttccatattcctactaggatggcccattaagtcccacttaaagcattccactacttttcaaatccaaagtcccaacatccatattcttcaaaacaaaagcatggtcaggcctatcacagcaataccccagtccctggaaccaacttcttagttagggttttactgctgtgaaccctatgaccaaggcaagtcttaaaaggaacacttaattggggttggcttacacgttcagaggctcagtcaattatcatcaaggcaggaacatggcagggtccaggcaggcatggtgcaggaggagttgagaattctacattttcatcaggaggctgctagcagaacactggcttccaggcagctagaatgagagacttataacccacacccatctactccaacagggccacaccttctaatcatgccgctccctgggctgagcttatacaaactaccatcatcttggtgttttgttgcatctatagaaaccctaatgaagatcgagtcagtgcgagagttcacaaacacagactcaaaggttcccgaagagtttggaaagctgactgaacactatagtcagcacaaagctttaatactcaacacactggctttgtgctctgactctgtcccttagggtcatctagcctagaacgaactattttagcttctttgaagtgaagtttcttcctgtgcaaattgagcatgacctgggattgctgtaatcaggtaagtctagagcctgcttcacagttagttagcatctctatgtttacataattacattttgtttcttagtatggtaactatatactgttcttatgtttccttgtcttttggtcttttaaaaggggtatagtttttttaatgtcccaaaggaaaaaaagtcaaagtttggggggcagcatatcacactggagtgtgacttcactgatccaacatgactgagaaacttactcatctttttttttcccccagatggacacattttatattattattattacttttaaactttttaatggttctgtgagttttgcagcacacaccccagtcccactcattttcccatcctctagtatctactctctgcccttgtaacctccctcaataaaaatacacaaacaaacaaaacaaaacaaaacaaaacaaagcatagaaacctctcacagaggaagctgtggtgtgccacagtgtgtctgtcccacaatatacctctttgtccacacatcttcacttgcaaatgttcactgcagtgagtcattggtctggtctgaggtctctggcttctgtgacaccatcagtactggatccttaccgcgactccgccttgttatcctgttgttgccctgtgtcatggagatcctgcagctttggatcagcaggaccagcccttttgcaagtgcccagcaattcacagttcacagtgaggggtggggccggttctgcacatcacctgggtagctggtggctgcccagaccccaggacaacctcatggtctctagtggcaatatgagccaccgatactgacatcgacccctgccactgcttagccacggatccagatccaggtcctcagcaatagcatgggcggggacgtcatcatggcctcaggtagggggtctggctattccacaacaggctttgcctctcttccctctagtctccagttccatcttccttcacagtactcaaatgactctacttctctttctctcccatctgtgcactacacacttgcacattgtagtggctcccactccaggcagggcatgtggctggagagcctctgggtgacctctgcctgcacagcgtggcatggcttggtctatagcctctcctaaggcatggcagcagagggtctatggctggttccccccctccccccttctgtaccacgtagcatggagtcaggcaagcttctgtgtgactacggctgggtgcctgaaaggaacgctggggctgtgtgggaggggtggcaagagaagaatgagaccaagacaaagtttctgatcaaggcccgatgtttcctttttgaatctgaactctaaaaggggggaagcccatctcctactatgccaggatctcgtggcttgtcaggaactcacaagctcagcctctcagcaggtagtggcatcttggaagaagctgcagatatggcagggcaatagtctttacctaggtcggaagactccacccgaggtggaatagccggctgtagcataaacaaggtctaaatcagcctctcaaggctaggggaaggcacacagagccttcacacagagtagcagcaggcaggtctgaggatatcttccttctctcacgctgttcaggctgatcatcatggcggcaggcaggactctgtctgcagcctgtctgggctttgtggtagagagcagatctcggggtctttccctgccaagcaccagaactgggtggcatggtggttggcaggtctctggatgtctcccgggtttacttttaacctctactgccatcagcacagtcctgggtgacactgcgatgacctccttgtcactgacctccgcacagcaatcaatggtcccagtcggaggtaaatcaggatgctctctattctaatgatatatttaaagtactgatgtcatcccattgctctcttcccataggttaaaattcagataagagctggcaggggcggggctgggagatgagatggcacctgtagtaaagtcatagggtagatagggtggaactgttgaaggtttctgaagaccacagagtgtaagatggttttataatgtcatttcctttactattacagcatgcttcctgacagagcattttggaaagaggcctcagaagagctccccaaaactggtccccaaaattgcatcatctggggatgctgacaggaagcaagaaaaacaaaaataggatccatccgtgatacattcatagtccttttttttttccccaaaaaacctcgagtacagttgattctttaccagtgacagttttaaccaccttgtttgggaggaatgtttactaaagccttaagtctcttttttttcacgaccaagagagattttctgcgacctagtgggtagcagcaggctgtgttgctaagcattctacagtgcacaggacaagccctcaccagagttatgtgacagccatcctggcactgcatacctgcaatctcagtatcctggagactgagggtggaagagctcaagcctgaggttaccctgggctaccctgggctacacagccggttccaggccagcctgcattatacaacaatacacttctttaaaaatgtttttctgctaaaaatgtcattgctgcagaatctgagaaactttgttcgaatgggtagaaatgttgatcttcattttacagaccagggagccagatgttctcagaagttctggtgcccacaacttgttcttacagcttggaaccctatgatcttttatcatgccatagcagtgagaagagtaagtagtgcagtggggcgggggagggattcaggactagggcacagaccgatgctcgataggtacttacagaggagcgagtggagaggaatgtatgtgaaggatgagtgttctactgctgttctcacatatggcctagcttttggtctacaatccaacagtgagctggggattgtgataacagagaaacccagatggtggtaagtggttgtgggtacctttattcagtttctggaggagtccagatcccacagactggaccttcaagactcttgccatcctccatcacagactgaggcaaatgacttctgagctgcgttggggtgaagttttccctctctgtaccagacgtccaggtcagctacggctccagcagaacatgaagggagttgtttctcagtgtctaaaaaattttctgtgatttgagctgaatccagtttattctggtaagtcctgagtcttctaatagagaacggatgaaaggaaagagggtggaaggggaggagcccaggattaaacagaccgtttcttttcacttccccatttggacttcacaattttgtctgttctctgggtactatctgccaagccgggagggaagcctgtgcctgcagctgactcgctccagagctgatgggaatcctgccgttcctactgatccccatggagagcaactggactgtccatgtgttctcacggactttgtgccatatgctactgtggacagccgtgctaagtaagtcgggacctccagaagagaggcaggggaaggacacctgggttggggttggatgaatcagcctggcataggaggcatgtcaggagtaagtaggaggctaatagttaaaatgtaacaacctggttggcctttgaaacaaaatcaaagctggcaggagtttttgctgtttcttcttttcctgtctcttggtaccaccttcccctcctctgatcaaaatctagagtcctagacttgagtgagcaattaaaagaccagtttctctttgaactcgtgattcacacaggaccaaatcttaggcaagatgtctagtactgcttaagacaagggctgggagaaagctcaaggatgcttttgaggggtggtggtggacactttattatataaggagaggtgctggagagatggctcagtggttaagagcaccgactgctcttctgaaggtcctgagttcaaattccagcaaccacatggtagctcacaaccatctgtaatgagatctgatgccctcttctgttgtgtctgaagacagctacagtgtactaacatataataataaataaagattaaaaaaaaaaaggagaggagtaggaaggtcaaggttgacctgggaacttgggttcagggtttcataaacatggacaagtctggcattgtcagttgtggggccagagaaatctctcatgcttccttcattgtgtagaccatgggacttggttctggccctgcttagtaagaaagtcatggtcagggtcttaggctgagatggaggaagactttctggtcctggtctcatctgtgggcagaggacagaaactgatggtgccaggtcattagcagagtctgggtgatgctcagtaagggagccctattccaggagcatcttctaagctcagttcctggggcatctacgcatacctctgagaagaaggcatactggtatccactcaccccaagttatgtggtatgactcatagtgaaatctggtcagcgctgagggacctcagctgtccaaatatatatttacacatacacagacacacacacacacaggtatatatatatgtatatatatatatatgtgtgtgtgtgtgtatgtatttatataaaatataatatatatatatttgataccagatagtttagttttcacatgggaagatcagtcctaaagaggcaatatgcctttctatttgtgctgtatagctatcaatcacttggtgaaaactcccaaggatgacattttcttccattttccttgggtacatctccattttcccccccatttttttttctgggcctccacacttaggtaggacatcctaacttccttcagttgtataataccctctgactttggtcctgagtagctatagaatcttccatccagctatggggaggcacggtgctttcgaagggcctttggtggaggcctgttatctcctgatgaagctccaggactgttctgcttctcccagttcccatttctcccacagtggatcgtcctcagccaggcaacgtgcccactgcacttggcttttactgcccgtgtttctgctgattcttaaagttgtttgcgccagacgctattctggatttgaggtcatatcagcaaacaaaactgttttcctgacctaaagtacaaggtctttgtcttccttatggggaacattagacacgaacagagttctcattactgtctcttgggtatagaatgaagcatgagtggtagtttccctcttctgcatctctttgttttttgtttttgctttgttttctctttttcatgcactgcacttgcccccttgccagtcctacatgctcaggggttttagcaattacttctccatcactagctcccagactcatttgtccttccttcctcggtatactttaatttctctgtctgttgatcagacacctatagatttatcagcatagacacaaatttatattcaaaattcaaaataacatcatttccttacatattttcttatctttgtaatatttctatctatatgagcaaagccaccttttccttggtcatccatttttatcaaccttatgtctcattagaagccaagtttcctcagtcttgtctcttagctttccctcacgtgtgtcttctttgcttcctattgtcaatgcagatgagtaagcaaggccacaagggaatatgggtacatttgatggagtcaaaggataaacaagttaaggggacctgcccacagtatctgagaagtaaaggcaggaagaactgtagttcaaagccaatatgggctacatgacaagtttgtagccagcctaggctacatgagactttgtctcaacaataataactacagcaagaaaaagataaagggatttgcaattaggtgatgataatgatgaatgggatgtgtgtgcatgcgtgtgtgtgtgtgtgtgcatgtgtgtgcaagtgcatgtgcgtgtgtgcatatgaaggtaaatgtggacttacgggtagacagcgatgatgaggtggtggtcagatgatcacagagactgtacttgggcaaatggaagagaagaggactggagggggattgtgatgaaacctcggatatttcattttgtggcctttgaagttggtgtggtttggagcggtgatggcaaggccttgaggtatagcatgggctgtgtggctaaactgtatgagagaatattcactacagatgaggaagtcatggcatgatgcagccagatgctgcacaggccactgacacatgttctagattaccggtaaccatctttttcttactaatctctgggacttcctctgtcccaattagtctgacacagcagtttcagctccaaagcaaacctctcattgtttactgagctaaacagcaaactttggaaatttgcctatgatcctttaaaaggtagccacgtggtatgtttggaacttcacagataccttatctggattgtcaccaatccttacaacaattatgtcgtaggtattgttgtcatcatctccatttataagccagggaatcaaggcagagaaaagtaaagttgtctctgcaaggtcactgagcatcagtcatattactttcttttctcattactttgtcaagacgccaggcaaaagcaacataagaaagggtttattttggcatatttttttagggcattgtggtgggaaggtgtggtggtaccttggctgaccaagtcacacccatagtcaggaaacagaggtggatgttagtacgtagctggctttcttctctactcttgtttattcgagccaggaccccagccctttggatggagacattcgtattcggagtgggtcttagcactatagctaaacttttccagaaacacctttgcagacacaatgagagatgtttccatggcgattctaaatctagtcaagctgataacataaactaaccaccaccgtggtaaagtcaacgtgtgaattttgtgtgcgttctcacttgctgctgttccagttggctttgacaatcctccagaatatggccgccacctccattttcgactgcgttcctcattatcggggtggtttttgtttctttgtttttaaacagaccaaagaagcattcaggctgcaacttgctgagagtgtttgcaagcatccgtccatctttcttggggaatattcctcttctgtttgtcactatgacagaacacttgcagctgcacgatgaatatttcctcactttctccgctagactaaacccagccaagtacagtgccccaagtcccttcctctgcagaacttcctagcctttgtccattctcttttataagatgtggtggcacaggactagggatgcagagcagggtagatctcgggaggagaaggccaacttggtcattctaggctagtcagggttatgtaatgagaccgtgtcaaaaccaaaagtggtttttttttttttttttgcacacatgcgtattcttatcatcagacttcagtgggggaacagagacttatatcttttcttttaggtatgctctgcaaggcacaaggtggtcaatgcagtctctaggaatacaaagagatgcattagcagggatttaagtgtacatcctgagatgtggggtgtggggatcagaatccagttttctagactgccagaagaatgctctttcacgaaacgccccctcctcttatccctgaaagtattcagacttggaaggctcttgcctttttcatctcaattgtaaaatcccatcatggacaggtgcataaacacacatgcatatgcacacacacatgcacatgtacatgcacacacacatgcacatacacatgcatgggcgctcatttatctcaagactacctttactatcatacccaacagtggtgccacatgtccatctttgtatttagcattcctgtcccatgtcccttcccctcaccatgtgccgttctatcggctcctgcaggaatcacagatctagtgtacttttctttcaatttaagttttagttttgtgaatgactgttttgcctgcatgtatgtctgtgcaccacatgtgtgcctggcgcctgaggagtccagacgaggatgtcagatccatgggaactggatggtcatgagacaccacgagggtgctgggaatcaacccaagtcctctgagagagcagcctatgcccttaaatgctgggccatctctctagccccatgatgtccttctgtaatttcttttttttttaattaggtattttcctcgtttacattttcaatgctatcccaaaaggtcccccatacccacccccccaatcccctacccacccactccccctttttggccctggcgttcccctgtactggggcatatgaagtttgcaagttcaatgagcctctctttgcagtgatggccgactaggccatcttttgatacatatgcagctagagtcaagagctctggggtactggttagttcatattgttgttccacctatagggttgcagaccccttcagctccttgggtactttctctagctcctccattgggagccgtgtgacccatccaatagctgactgtgagcattcacttctgtgtttgctaggccccggcatagcctcacaagagacagctatatctgggtcctttcagcaaaatcttgctagtgtatgcaatggtgtcagcatttggaagctgattatgggatggatccctgcatatggcaatcactagatggtccatcctttcgtcacagctccaaattttgtctctgtaactccttccatgggtgttttgttcccatttctaagaaagggtccacactttggtcttcgttcttcttgaatttcatgcgtttggcaagttgtatcttatattttgggtatcctaagtttctgggctaatatccacttatcagtgagtacatattgtgcgagttcctttgtgattgggttacctcactcaggatgataccctccaggtccatccatttgcctaggaatttcataaattcatttttccttctgtaatttttttaccctaccaaatttgcctagcagcaaaacctggaatacctaaatcctttttaaaaaaagatttatttatttattcatttatttaatttatttaatgtatgtgagtacactgtagctgtcttcagacacagtagaagagggcatcagatcccattacagatggttgtgagccaccatgtggttgctgggaattgaactcaagacctctggaagaacaattagtgctcttaaccagctgagccatctctccaacctgaagacccaaatcttaagcaatgggcatatgaaataaatcacaagaaagtcagttgtagggtagggcacaaatgctcaaatgacaataaacagactaagctattaggtcttgtattgcttagtgaaaagtcaggcgggagagcactcttctggtgtggtctctttgctctgtgtgtgtgtgtgtgtgtgtgtgtgtgtgtgtgtgtgtgttcatgagggaaattctaaggacatatatacccagtgataatattttgtcatgagtattttctatttgtcaacaaagatgatggactatccacaggatctgtagtccctcctcatgaaagaaaaaccctactcccaggatggaccttggcaaagtctgatgtactaaaccactaattctatgtaaacttcaaccggggccttagcagtcaaaggtgttcggccctttaaagtgtcacaacacacatgctaaggggaaggggcctaattatctctgaaagtgtgctttatccaggaagtcccagggaagggccaggccttgaagggtgggctgtgggagtgagttggggctctgggtctgggtaggcatgtctcagtacagaaggccctggttgatgcttacttcctttcttacagatcttgctgctgggactcatggtaagtcttctttttatatctcctcactctcttctttgtcaccgtctctttgtctgtctggagctgctctgaatggatcagcaaccgggctcagtatcaggtcaggaccaggaatggaccattgttctcagaagatgccctgcacttctccttctctctgcctgggaaggaagatgatcaaaagccatggctagctaggatatcaactcttttagtcctgttagagtgagatgtggccagttatcacaaactgtccttgttctcaactgcccttcactctcttagtaaaattgtttaaaaggttgacctcaaagaagcagggagtgaatgcccagagcctgaggaagtggaggagaggtaaggatgaagacaaagtggttaatgggcacaggggtcgagtttgatatgaggagtaacttctaatgtgctgtagcaagaaaggtgtcttagttagggtttctatttctgtgtagaggcaccatgattgcaacaacatttaattgaggagttccttacagttcagaggttcagtccattatcatcacagcaggaagcatggcagcatccaggcaggcatggtgctggaagggtagctgagtgttctacatctggatctgtaggcagcaggaagagagagtggcactgggcctggcttgagcatctgaaacctcaaagccaacccagcgacccacttcctccaaaaggccacacctactccaacaaggccacacctcttaatagtgccactccctataaggggccattttcattcaaatcatcacaaaggccttttcccaattgaggctccctcctttcagataactctaatttgtatgtcaagtttatgatactagccagcacagagctccatgccctgttcttctgattagagaaccatctgcaactgggggtggggtaggggggagtgacaggagggatggagaagagaaatggaaatatatcttggtgagagatatttctggggtgtctcctttgccccctcctatcttctcttgctttaccctgctgaggatcaattacactccttgtgatttccctggggctcacaggatggaataagtagaagaattcaatggaagaagcttcctgggcctggtcccacccttggtgctctcagtaggaatgctggtgtctttttagcagaaacttggggcctgctgaggttcttggggcttccttgcctcacactgcctgctctctccaaaattgagcagatcttccaaaggctgtggtcaaactcgagcccccgtggatccaggtgctcaaggaagacacggtgacactgacatgcgaagggacccacaaccctgggaactcttctacccagtggttccacaatgggaggtccatccggagccaggtccaagccagctacacgtttaaggccacagtcaatgacagtggagaatatcggtgtcaaatggagcagacccgcctcagcgaccctgtagatctgggagtgatttctggttagtaaaggctggccctgggaggagatgggataccaagaagttgggggtggagtggggtggatctgcttactgcaaagtttgcaggaaatggggtgggctggtttctgggaagcatcccagggagctgcttcaagggctttttgtccacccgtttccgcttttgccagcccctgtgctcagcctgcagtggagggcacacaaattcctgagaaactgtgtgaacagtttgttgtggtagtcctggttgagcaagagagttcaagggcacgggcagctgaatgtggcagaaaaaggaagtccctatttcatagaaacccttctagttcatgacacccagaaaaatgccaatagtatgcaactgaatccaagccctggggaagaactgtgtatacaaagctgactgatgtatttaaccttgagctcaggattctcatctgctcagctgaaggtgcggagacctctccccagaaggttctggggagcactcacctctcccccttgcagttccagcaggtccttgactttcttttttttttcttccatcaccttgtgagcactcgacgtgaaaagctgtgtctcgtccatcttcatatttgcagtatccgaaacagggcatggcttgttaaaactttgccgagcagatcattgattttacaaggctcctggcaaaaagtaggtttcccttctagaagaactaccaggtgctattagcaactgctattgctgtcgttttacgtagttccctcctatcatccggtccagggtttcctcaatggtatacccacagcaagctaacgatttgctccaaccctgcttggactgtggttccacatttattactaatcattagagacaccgacagttttggaggttcaagctgttcttccatcccccaaatggaagactctgttgtatctgcttcatacttgtctcctctggccgactgaattccttcatctttcctgccaagaagggaggaatcgcatccccatctcaggagaggaagggcaacacgcgtgtatcttggatacctgttgcgcgccatgaactactgtcgccgtgaaatctgatcatgtctattttcacagatgaagaaagtgaggcccagaagccttaactttcttgccccaaattgaagagctcccaaatgaatggagctagaaacagagatcgactgcctgacgtcaaactaaagctctcccccttagcatatcgcatcccactaggaagaacgacctgaccctctgagtgctatggtcctttcgtgtctttcagactggctgctgctccagacccctcagctggtgtttctggaaggggaaaccatcacgctaaggtgccatagctggaggaacaaaccactgaacaggatctcgttcttccataatgaaaaatccgtgaggtatcatcactacagtagtaatttctctatcccaaaagccaaccacagtcacagtggggactactactgcaaaggaagtctaggaaggacacagcaccagtccaagactgtcaccatcactgtccaaggtaagtggactctgtcaagatattggaaaaggagaagaggagataagcaaaggtttatataaacctacagtttatatagctccacatggagatctaggagtgccacagagcaaagctgagctttaaggcaaaggcaagagctatgaaggccttgccaagtgatgccaagtgggctcgggccagagttcctcacttgcaggcagtgggtgacaaggctgctgggcagcagagccttgttgttgctacatagatactttatgctcctagacattcctaagagctgaagtttaacttcttgtccctcatgtaacagccgttcactcttgaacactgttctagatagtggtagtaccagccactctgggaggcttcagatccatcctccctgccacctctgacggctgtcccttctgctactacactgttaccagtgtgccttcattagtttggtttaaggtttgtggggaggcacgagtctgtccactaaaggtatgcttatgaggtctcagggaaatgtactacacctatgagtgaccagacacagtgactgggcataggattggaggagggatggattcatggagagtacttaatacctgtcctcatgtctgtcttctccagggcccaagtccagcaggtctttaccagtattgacaattgtggctgctgtcactgggattgctgtcgcagccattgttattatcctagtatccttggtctatctcaagaaaaagcaggttccaggttggtggctctctttggtgcctcttattctcagctagctaggggttactcatttgattttgatattgtcccatcctattcattcacctacttacaaatatatctgttaagcaagacttgaacaaacctgatgatgtgccatgacctgtgctagacactgtaggcactggattccatttctacccccagctggctctcagcattgtgaggaataccaggcacaccagtgggtacttataagaagggattagaggcaatgctaaagacctgcttgtgtcctgccatcccaggacagtaatgcagaagaactgaagtctgaagccagggtcagtgagatggtccagccagtgcaaattcttgcagttcaagccctgtgatcttagttcaatcgctgggatccaagttaagttggagagagagagagaactgatcctacaagggtgtcctttgacctttgtagatgggctatggtgtgtaccgcaccccaccacagcaataaataccttaaaaagtatgtttttttttccaaagagtctgatgctagcttggactgtaggataaacttgaagccagcctgtgctacacagaaagactctttgtaaaatataaaagagagaggcgagtctataaccctgtgtgtttgtcagctttctgtcagtataacgaagtgcttcagataatctacctatgaaggaaaaacactgctaggcatggtggtatatatatacatatatatatataattttagcattcaggaagccaaggagggtcacaagttcaagattctatcttaaaatagctaagtaaataagtaagtttagttgagcactgttttatagacttggtccatattcccttggccctattgctttgggcccagcaaagctgtaatatcccacattcacaacaggataaaactctcacttaaggccagtaagaagagatcaaggaagagactggcaatcccacaatcttcttcttcaagagcatgtccctaatgacctaaagacttcccactaggcccaaaacactgaagggtcagcttcctcccagttattccaccttgaccaatcacttaacacatgagattttaatggacatctcagatctaaatggtggcaggcagcctggctggaacagttagaaaatgtttcattggggagccagtgtgatgttgtgactgaaatacacacacggggaccaaattgctgtggtccaaacctcaactcacagcttaccagatctataatgttgagtaaattactcagcctttgggccccagtttaccagtctggaaaatgaacactatggggcccaccttacaggaatattaggacaatgaataaggccaaagcctttgtaccagaacctcaaagacaaaaaagaacacatacatagaggttggagagatggctcagatgtaaagagtactgactgttcctccagaggaaccaggttcaattcccagtacccacacgacaggtcatagctgtaactctggctctaagggatctaacacccttgcacagacataaatgcaggaaaaacacagattcccatatagtgaaaatacatcattaaaaaaaatacataagtataagctgtcaccactgtggagaaggatgatgtcccgggggtaggcatcaaggcaaagtggaagagcgttctaggatctgtggccaagcgtggaaatgaggaatgttgtaggcaggtcaatggaagccattgaaaaaggggaaatactactactaactaatacctgatacctcaaagcacactctgcattggctagttatggaagattagtaaatactgagatatgcagatagaaaggttacactgttttctttagacagggtcttgctttgtaaccctaactagtctggaattcactgtgtagaccaggctggcctcaaactcacagagatcttcttgcctttgtctcctgggtgctgggattaaaggtctgctccattacgcccagccaaaagatcacacctttaaaaggctggacgaacccaggaaagttgcaggggggttgttttatgtcacacctctgggtgtcctgttgggttagtcactatgggctggagatgtttctgggcaggggagctgggaattggggaagagaggtgttgctggtgtgaggggaaggtctctgttgcttttaactctgttctgaccctgctccttgatcctgggctcaccccataatcctactaacttcctacgtgcccctcctagctctcccaggaaaccctgatcacagggaaatgggagaaacccttccagaggaagtaggtgagtacagacagccctctgggggctcagtgcctgtcagcccagggcctccatctggactggagccaacaagcagcagcccatgtgagttcagtgggagtacaggagagggaggagccgtgggagaaggctgtgactcaaatctcttggtcagttctgagtctaactcttggacctaaggaagatctcactagagatgagaacaggaacgttgattccggatcgaggaagagggtgggccgtgactaaactctagtaaaacaaggaatccggacacatttccagtacaggactgcaaaggcatttgcatcttttgggggagatgtggcagagttccaaaggacagggttagcagttgtgagacagaggtcaatggggtggggcagcctaggacaaaaagagatctgaggtaaccctggagatcttttcaggaaggtgtccctgtgtagaggtactgctgcgcttagaacagctcaacttttagtaaaatattgagaggagatttgagttgaggaaattctaggggattggagctattcataggatacactttgtgggcacaatgtggctctaatgcccactcatgatagtttataaaacattgacctgatcgttgatccatgatgatacaactgaatctggagtaggtcattccccaaagtgcggaaggaataagtgggtggatgagtggtttagatggcctctgaacccttatatagttccgagatttgaaagcctggtgcaggaggaagaatataggagtgggagttgtctcactgtagttaaagacaaagcataaaggctagtggagttctctagaggcttccatgacagcagaactaggcaggaggaagggtttcatgtagattgcatttcaggaggctggagtgtgactcagagctgagccaacagataagagagcttgagcaaaacagcattcacttagcttggcttagagcaaggtctgcattcttcagccaggctgcatagatccatgtccaggattgaactagatctataagaaaatcacaactggactcactttcttgtctggctctgtctactctggtataaacacatttcacatggcatttatgcagcctggcacctgagctggggtttcccctgaaggcatagttagctactgggattgctaagtagtatataaaagggaggagcaccgaatgcgttgtggggcagaatttagaacatagcaaatagggctctttgtgtttggggagcgagtgaagagactgaagacattgtctcaacctctttctcctcttccaaaaatgaaggtttatagacactggggttgcttttcctactggcaaagggaactttgggcaaaaatataagagaatgtggtgtttgggatattagagaaacatctttttcttctctttctttcccatttccctctctctttccctccctttctctcttctctttctttctccctctccgctctctttttctttctttaaaatatatttatttactttatgtatatgagtacacagcagaagagggcatcggattccatgatggatggttgtgagccaccatgtggtttctgggaattgaactcaggacctctgggacagtaatcaatgctcttaactactgagccatctctccagctcgctctctctctctctctctctctctctctctctctctctctctctctctctctctctctctctctctctctctctctctctgtcatagcatacctacttctccagtgcttcagcaagaataaactacacttgtccagtatggaaacagccatctgagaagacaaacatccgggcttgatttcactctgatctaaaccctgatctaaacccttctgcactccgttctccaacctcacagagcctcagtgctgcctagtctgctgctaggaaagttgagcgattttctgacaaggatgtggcatgtggtggggtttgtttccctttgccagtatggcctgcagagaaagctggcttccacgatggtcagggaaggaggcagcactgcttggcccaatagcctgggttggggttggcaagccgtgtctggggtcttcgctttgagctttggttttgcagcctcagtagcagcccatctggccctctttcccagcagtgcccatgctgatcacttattttcatccacagacaatcctcctgatctggaagaagctgccaaaactgaggtgagggagcccagccctgtcctatccctctccccgttcatctgcttccccacgacctctcctcagctctcatggctcgtttctgctttccctaggctgagaatacgatcacctactcacttctcaagcatcccgaagccctggatgaagaaacagagcatgattaccagaaccacatttagtctcccttggcattgggaaaagcaagccagaaaggccaggatctagtgtctcctggtccaagggatgctgtagatattaaagaaaacatccagagtcacttctgtgagtcctgaaaccaacagacactaagagattggttcccagtggttgactgtactaatgactcccataacttacagcttcccaactcaagactcttctgctatcgatccacactgccactaaaattaatcaacttactgccgttaagagactgcagcaacgtgggaactgcttataattcacgctaagataaggagaacaattaatgttaggatgcatcatctcggtgatgataaaccagacttgtaccaacctgtcaaaggtgatgcttctttataaggaacttcaattttttttatttttctataaaggtcgcatgttactttaatagtaaaatgttgtaaaaacaaaccatctttctatttactttttcaaggctgcaatgattggaatacaggctgagctctctggggtttgttggtcttctgccagaagactcttggggagatgggttaactttcccctggggagacataagagtcttaggtagagccctcatgacagaccaaagtcatatgattacactcaagtctagtttggtgcaccagtgagtttatccagcttatttgtggggacatgagtgaagggttcctttcaggggtgtggaagatcttataacaacagtcttagcaccaatgacgtctttacagccacatagatggtcccccaccccctctttagtttgtctccctcaaactcccagtcctgaagcctgtgcctttagacctccaggataatgagcatgcacgactatccaccaccacacctggcctggtagcagtagataggaggtagaggagaggacagacagggatttggagtagagggccagtgcccctcccctccaaactgaacatgcttccagtgaacttgtctttttgtttccacttccttcttctcttttctcctatgacaaacagagtaaccactttgttatgtaacaggagttctcaggaagtcaaactttggatgaaagccagtggtaactgaaggatgaccttgaactcctggtcttgctattcccacctcctagttgctcggagcatattatgtttgtatgttcgcaaaaatcactcaggcagctatttaagcttgctgtaaccacatgagttcagagtgtagacatataaagggaaaaaaagggagaaattctatgttgtcctcattcctctttcttcttcttcttcttcttcttcttcttcttcttcttcttacttcttcttcttcttcttcttcttnnnnnnnnnnnnnnnnnnnnnnnnnnnnnnnnnnnnnnnnnnnnnnnnnnnnnnnnnnnnnnnnnnnnnnnnnnnnnnnnnnnnnnnnnnnnnnnnnnnnnnnnnnnnnnnnnnnnnnnnnnnnnnnnnnnnnnnnnnnnnnnnnnnnnnnnnnnnnnnnnnnnnnnnnnnnnnnnnnnnnnnnnnnnnnnnnnnnnnnnnnnnnnnnnnnnnnnnnnnnnnnnnnnnnnnnnnnnnnnnnnnnnnnnnnnnnnnnnnnnnnnnnnnnnnnnnnnnnnnnnnnnnnnnnnnnnnnnnnnnnnnnnnnnnnnnnnnnnnnnnnnnnnnnnnnnnnnnnnnnnnnnnnnnnnnnnnnnnnnnnnnnnnnnnnnnnnnnnnnnnnnnnnnnnnnnnnnnnnnnnnnnnnnnnnnnnnnnnnnnnnnnnnnnnnnnnnnnnnnnnnnnnnnnnnnnnnnnnnnnnnnnnnnnnnnnnnnnnnnnnnnnnnnnnnnnnnnnnnnnnnnnnnnnnnnnnnnnnnnnnnnnnnnnnnnnnnnnnnnnnnnnnnnnnnnnnnnnnnnnnnnnnnnnnnnnnnnnnnnnnnnnnnnnnnnnnnnnnnnnnnnnnnnnnnnnnnnnnnnnnnnnnnnnnnnnnnnnnnnnnnnnnnnnnnnnnnnnnnnnnnnnnnnnnnnnnnnnnnnnnnnnnnnnnnnnnnnnnnnnnnnnnnnnnnnnnnnnnnnnnnnnnnnnnnnnnnnnnnnnnnnnnnnnnnnnnnnnnnnnnnnnnnnnnnnnnnnnnnnnnnnnnnnnnnnnnnnnnnnnnnnnnnnnnnnnnnnnnnnnnnnnnnnnnnnnnnnnnnnnnnnnnnnnnnnnnnnnnnnnnnnnnnnnnnnnnnnnnnnnnnnnnnnnnnnnnnnnnnnnnnnnnnnnnnnnnnnnnnnnnnnnnnnnnnnnnnnnnnnnnnnnnnnnnnnnnnnnnnnnnnnnnnnnnnnnnnnnnnnnnnnnnnnnnnnnnnnnnnnnnnnnnnnnnnnnnnnnnnnnnnnnnnnnnnnnnnnnnnnnnnnnnnnnnnnnnnnnnnnnnnnnnnnnnnnnnnnnnnnnnnnnnnnnnnnnnnnnnnnnnnnnnnnnnnnnnnnnnnnnnnnnnnnnnnnnnnnnnnnnnnnnnnnnnnnnnnnnnnnnnnnnnnnnnnnnnnnnnnnnnnnnnnnnnnnnnnnnnnnnnnnnnnnnnnnnnnnnnnnnnnnnnnnnnnnnnnnnnnnnnnnnnctctctctctctctctctctctctctctctctctctctccctctctcgttctctgtctgtctctgcctctctcaaatgaataaccattgttgtaggtgttgtgtacattcagggtatatatatttgttattgtttttagaaagcctatacatgtgattatattgttgacttattttgactgggcctttctggatgtcagcctagcttcaggctcattgaaagaccctatctcaaaggattaagcagagagagatagagcagggtatcagatgttttcctttgacctctgcacacccacacataggcagcccacacacatgtgtgcctatgacacatacaaataaaataaataacaataatttttaaaaatcactccagaatttctgctttgaactccctgataaccaagccgtggttgcacggatccatccttgtgtggatcttagtggttcaatccaaacacacagaacaaataaggttgtctgacaccagggagacctcccgaagctcttgcctaatgtgcacctttgagtgtgcctcatggaatcaagtcagttctttctcatatcctctttagcaagacccttcctggacactgctctttgtttttattttctccatggtacagtgtagataattatgcatctccttcttttatatattctcatatatactaaaatgtaagctcacaacagccctgtgttttcatttttcactaacatagtccagagaccagaacaacgcaatagattgttgaatgaattaataaataaaacttgcctctcatagtttctgggttatttgatattcttgcatgctggccaagtgctctaccactgagctacccggtgttatttgacgttcttgatgctgtggcttagatttgttcccctgaaaccatacattggaaacagtccccaatgcaagagaggtgggaggtggggtctgatgggaggtgactagcccacagcagagagctagttctgtgggagtggcttccttctaaaagggtgagtttgctatcttttggctgtttatccttcctgctccatttcccccttcttaacccatgaaatgacagggcaagaaaacctttaccagattctggtccctgggtcttgaacttcccagcctccagaatatgttaataaataaaaactccctgaggggttgtcatagcaacctgaaaaggactttctgaatctcaagaggtcaatgaaaacctatctttccttgaaaccttagcaaatttatctaaaattcttacatgcattggaaaagatttgaacttaaatagacttgggagtccgttttgaatttggtgtaaggtgagtacctgacaattttttcctgtcttgaggctaggtattccaaggttattccttgagcaaatgattgaaaatggttcaaatatcattatcaactcccacacacaggtctacacccatgtccagtcctctttggttgccttatttcatttctttcttcccacctcagtagcatacacattattattattattatattttgatgtgtagaaagccctgttttctctcatttgtttgtttcaagattttcttggctgttgttctcttctagataaacttcagaatttcacaaaccatagggccctgggataattgtctgtgtagattacttgcataaggttttacatctgtgttatactgagacctcccaaggtatagcttcttgcttgtttggataatagacttctcttataacatggccttttaaaaataggacatattagatgggctatggtggtgcacgcctttaatcccagcacttgggaggcagaggcaggcggannnnnnnnnnnnnnnnnnnnctgtcttgaggctaggtattccaaggttattccttgagcaaatgattgaaaatggttcaaatatcattatcaactcccacacacaggtctacacccatgtccagtcctctttggttgccttatttcatttctttcttcccacctcagtagcatacacattattattattattatattttgatgtgtagaaagccctgttttctctcatttgtttgtttcaagattttcttggctgttgttctcttctagataaacttcagaatttcacaaaccatagggccctgggataattgtctgtgtagattacttgcataaggttttacatctgtgttatactgagacctcccaaggtatagcttcttgcttgtttggataatagacttctcttataacatggccttttaaaaataggacatattagatgggctatggtggtgcacgcctttaatcccagcacttgggaggcagaggcaggcggatttctgagttcgaggccaacctggtctacaaagtgagttttaggacagccagggctacacagagaaaccctatctcaaaaaaaaaaaaaaaaaaaagacacactttatgtgcatttgtgttttcttgggtattgtatccatggagttacagagagttgtgagctgccaaatgggtgctgggaattgaacctgggccctttggaagagcagccagtgctcttaaccagtgaggcatctctccaaccccaacatggccatggtttgcatgagagtttagactccgtttcccccactccatatcactattactctgattaaaattttctatactttttgaagacaattttgaaaaggtgtattttttttcctggtaaatcacacattttattaatttaacagccagctactgcttcctctccttctttctctttctttcttcctttctctctctctctctctcccttcctttctctctctttctttctttctttctttctttctttctttctttctttctttctttctttcttcctttcttcctttcttccttcctttctttcttcctttcattgtaaggatctcatgtagccaagactgacctcacaatccctttatatagctaaggatggccttgatcctcctatctccacctcccacatgctggaattaaaggagtgtaccaatacccgatttgtgtggtccttcagatcacactcagggtttcctgcaaacaattacagcatttttttcctaataatttgtgtgtttctacttacccatggactcttccccccttcttagcttttgggctgtcttttatcaggatgacttggttgggaataacaggaaatcgtgattaaaattggtttaaacaataaggaaatctannnnnnnnnnnnnnnnnnnntcggtaccctaaaagtaagctcacaacagccctgtgttttcatttttcactaacatagtccagagaccagaacaatgcaatagattgttaaatgaattaataaataaaacttgcctctcatagtttctgggttatttgatattcttgcatgctggccaagtgctctaccactgagctacccggtgttatttgacgttcttgatgctgtggcttagatttgttcccctgaaaccatacattggaaacagtccccaatgcaagggaggtggggtctgatgggaggtgactagcccacagcagagagctagttttgtgggagtggcttccttctaaaagggcgagtttgctatcttttggctctgtttctccttcctgctccatttcccccttcttaacccatgaaatgacagggcaagaaagcctttaccagattctggtcccagcctccagaatataaagaattatattaataattaataaagaatcatccaagtccctgagggattgtcatagcaacctgaaaaggactttctgaatctcaagaggtcagtgaaaacctatctttccttgaaaccttagcaaatttatctaaaattcttacatgcattggaaaagatttgaacttaaatagacttgggagtccgttttgaatttggtgtaaggtgagtacctgacaattttttcctgtcttgaggctaggtattccaaggttattccttgagcaaatgattggaaatggttcaaatatcattatcaactcccacacacaggtctacacccatgtccagtcctcttccgttgccttatttcatttctttcttcccacctcagtagcatacacatcatcatcatcatcatcatcacatcatcatcattattattatcattatctttattatattttgatgtgtataaagccctgttttctctcattcgtttgtttcaagattttcttggctgctgttctcttctagataaacttcagaatttcacaaaccatagggccctgggataattgtctgtgtagattacttgcataaggttttatgtctgtgttatactgagacctcccaaggtatagcttcttgcttgtttggataatagacttctcttataacatggccttttaaaaataggacatattagatgggctatggtggcgcacgcctttaatcccagcacttgggaggcagaggcaggcggatttctgagttcgaggccaacctggtctacagagtgagttttaggacagccagggctactcagagaaaccctatctcgaaaaaaaaaaaaaaaaaaaaaaaaggacacattttatgtgcatttgtgttttcttgggtattgtatccatggagttacagagagttgtgagctgccaaatgggtgctgggaattgaacctgggccctttggaagagcagccagtgctcttaaccagtgaggcatctcttcaaccccaacatggccatgttttgcatgagagtttagactccgtttcccccactccatatcactattactctgattaaaattttctatactttttgaagacaattttgaaaaggtgtattttttttcctggtaaatcacacattttattaattggcatacagccagctgctgcttcctctccttctttctctttctttcttcctttctctctctctctcccttcctttctctctctctctctctttctttctttctttctttctttctttctttctttctttctttctttctttctttctttctttctttctttcttcctttcattgtaaggatctcatgtagccaaggctgacctcacactccctttatatagctaaggatggccttgatcctcctatctccacctcccacatgctggaattaaaggagtgtaccaatacccgatttgtgtggtccttcagatcacactcagggtttcctgcaaacaattacagcatttttttcccttataatttgtgtgtttctacttacccatggactcctccccccttcttagcttttgggctgtcttttatcaggatgacttggttgggaataacaggaaatcgtgattaaaattggtttaaacaataaggaaatctattatctcccataacaaaaagtctagagacagagagtctccttgcatcaggattctgagacatcccccctccccttttctgcaattctctggctactgtccttgggcaagtaagaacacatagcaactctacaggtcatatcctggtatctagaaaaagaaggggactaacttttttggtatgtctcttaaaagcaaggacaatattctcagaagccctgggcgatgctcttgtcatagtatactcaggatagaccattcttttttctttaatttttttattagatattttcttcatttacatttcaaatgctatcctgaaagtcctctataccccccgccctgctccccaacccaccctctcccacttcctggccctggcattcccctgtcctggggcatatgatcttcgcaagaccaaaggcctctcctcccattgttggctgactaggccatcctctgctacatatgcaactagagacacagttctgggggtactggttagttcatattgttgttcctcctatagggatgcagaccccttcagctcattgggtactttctctagctttttcattaggggcactgtgttccatcctatagatgactgtgagcatccacttttgtatttgctgggcactggcatagcctcacaagagatagctatatcagggtcctgtcagcaagatcttgctggcatatgcaatagtgtctgggtttgatggttgtatatgggatggatccccgggtggggcagtctctggatggtccttccttccgtctcagctctgaactttgtctctgtaactccttccatgggtattttgttccccattctaagaaggaacgaagtatccacactttggtcttccttcttcttgagtttcatgtgttttgcaaattatatcttgggtagtctaaatttctgggttaatatctgcttatcagtgagtgcatatcatgtgtgttcttttgtgattgggttatctcactcaggatgatatccttcagatccatccatttgcccaagaatttcataaattcattgtttttaatagctaagtagtacgccattgtgtaaatgtaccacattttctgtatccatttgtctgttgatggacatctggattctttccagctcctggctattataaataaggctgctatgaacatagtggaacatgtgtccttattataagttggaacttcttctgggcatatgcccaggagaggtattgctggatcttccggtagtactatatccaattttctgaggaaccgccagactgatttccagagtggttgtaccagcttgcaatcccaccaacaatggaagagtgttcctctttctcctcatcctcaccagcatctgctgtcacctgaatttttgatcttagccattctgactggtgtgaggtagaatcttagggttgttttgatttgcatttccctgatgattaaagatattgaacttttttttcaagtacttctcagccattcggtattcctcagttgagaattctttgtttagctctgtaccccatttcttaatgggttatttgatttttctggagtccatctttttacgttctttatatatattagatattcatcccctttctaatttaggattggtaaagatcctttcccaatctgtggtggcctttttgtcttattgacagtgtcttttgtcttatagaagctttgcaattttatgaggtcccatttgtcaattcttgatcttacagcacaagccattgctgttctgttcaggatttttttctctgtgcccatatcttcgaggctttcccccactttctcctctataagtttcagtgaggatagaccattcttaaagccctgatttaaaaggagaccaagatgaccatcacatacctagcttaatcccgtcaaagaagagtgactgttgagactgaaacctaaccgctgtgtctttgtccctcctggatgcctcgataaaggtttacctggttgatttgttttgctttctttttttctgacttgtgataactttgactttttttttttttttttttttttgagacagggtttctctgtatagccctggctgtcctggaactcactctgtagaccaggctggcctcgaactcagaaatccacctgcctctgcctcccaagtgctgggattaaaggcgtgtgccaccactgcccggcaactttgacttattaatcaagtattttgccttttgcttggtttcaagcatgatattttctactttatttacatttatgtgatatattacttatttctaaatttcttgttttcaaacaaattaataaaaggctgtaacttctccctgtattgatgttttggccataagcatttgacttaaatatgcatgtctgtctatgttctttctgaatagtttataattttagctttattttcttccttttttaggctttattttattttatttattaatatttatttatttatgtatttatttatgtcaccacgacacaagccaggat

SEQ ID NO: 1299 - DNA, 1341 bp, Mus musculus
tgtgcctgcagctgactcgctccagagctgatgggaatcctgccgttcctactgatccccatggagagcaactggactgtccatgtgttctcacggactttgtgccatatgctactgtggacagccgtgctaaatcttgctgctgggactcatgatcttccaaaggctgtggtcaaactcgagcccccgtggatccaggtgctcaaggaagacacggtgacactgacatgcgaagggacccacaaccctgggaactcttctacccagtggttccacaatgggaggtccatccggagccaggtccaagccagctacacgtttaaggccacagtcaatgacagtggagaatatcggtgtcaaatggagcagacccgcctcagcgaccctgtagatctgggagtgatttctgactggctgctgctccagacccctcagctggtgtttctggaaggggaaaccatcacgctaaggtgccatagctggaggaacaaaccactgaacaggatctcgttcttccataatgaaaaatccgtgaggtatcatcactacagtagtaatttctctatcccaaaagccaaccacagtcacagtggggactactactgcaaaggaagtctaggaaggacacagcaccagtccaagactgtcaccatcactgtccaagggcccaagtccagcaggtctttaccagtattgacaattgtggctgctgtcactgggattgctgtcgcagccattgttattatcctagtatccttggtctatctcaagaaaaagcaggttccagacaatcctcctgatctggaagaagctgccaaaactgaggctgagaatacgatcacctactcacttctcaagcatcccgaagccctggatgaagaaacagagcatgattaccagaaccacatttagtctcccttggcattgggaaaagcaagccagaaaggccaggatctagtgtctcctggtccaagggatgctgtagatattaaagaaaacatccagagtcacttctgtgagtcctgaaaccaacagacactaagagattggttcccagtggttgactgtactaatgactcccataacttacagcttcccaactcaagactcttctgctatcgatccacactgccactaaaattaatcaacttactgccgttaagagactgcagcaacgtgggaactgcttataattcacgctaagataaggagaacaattaatgttaggatgcatcatctcggtgatgataaaccagacttgtaccaacctgtcaaaggtgatgcttctttataaggaacttcaattttttttatttttctataaaggtcgcatgttacttt

SEQ ID NO: 1300 - protein, 298 aa, Mus musculus
LAPELMGILPFLLIPMESNWTVHVFSRTLCHMLLWTAVLNLAAGTHDLPKAVVKLEPPWIQVLKEDTVTLTCEGTHNPGNSSTQWFHNGRSIRSQVQASYTFKATVNDSGEYRCQMEQTRLSDPVDLGVISDWLLLQTPQLVFLEGETITLRCHSWRNKPLNRISFFHNEKSVRYHHYSSNFSIPKANHSHSGDYYCKGSLGRTQHQSKTVTITVQGPKSSRSLPVLTIVAAVTGIAVAAIVIILVSLVYLKKKQVPDNPPDLEEAAKTEAENTITYSLLKHPEALDEETEHDYQNHI

SEQ ID NO: 1301 - DNA, 16652 bp, Homo sapiens
tcttcacctgctccgtggggcactaacgcctccctcagaggcttctggtgagaatcagtgtttccctgcccccgccccgccctccatgccccttctccacgttctcactgtgctaggtgctcttctctgtctttctcttccaccagcctgtgggaaacctgagatgaaagtcgtgtcttacccatctttgtatttccagcatctgaaactgggcagagcttaataaatattttgctggagaggttgatgatcttacaaagctcccattgaaaggtggctctctgtaaagcaaagttacaatgagattgtgatgaacattgtccttgtggcttttcacttagtcccctcccttcacctgaagagcaaattttcctcaaaagtacacagcaaacgaatgacccactggtgacactgttgcctttagaccctgctggaaagaagctccacatttattaacattcccgaagtaaatttatcaggtagcattcatcaggtaacatttgttgcacattcatgacttttctactgtccacaaaggcatatgtccttatcatatgcggactcctcggtcacactggattcttccttccctcctcgacatggaagagatggcatcttagggtctcttgtgttcttcctgcagaggcctgtcgggcaggaaaaggctgcagctgccttcctgggagaaggaggagatgagtgtatcctgaacacctattatgtgctaggggctattgtagatacatgacactatcatgctcattttcacgaatgaggaaactgaggctcagaagacttaaattatttgcccaagagttcataaatgacagagccagcattagagtccaggactgtctgatttcagacctaagctgttccctctgcacatcgtgtcccaccagtaaggaagatctgggtctcagagctgagccaagacctcccgggtcctctgcggttttttgtgtctttcagagtggctggtgctccagacccctcacctggagttccaggagggagaaaccatcgtgctgaggtgccacagctggaaggacaagcctctggtcaaggtcacattcttccagaatggaaaatccaagaaattttcccgttcggatcccaacttctccatcccacaagcaaaccacagtcacagtggtgattaccactgcacaggaaacataggctacacgctgtactcatccaagcctgtgaccatcactgtccaaggtatgcggagtctgccaagatgtagggaggggagaagaggggatggacaagggctgaggtcacatgggcctacatggaggtctgagaaaggccacagcgcaaaattgggcactggagcaaagaggagtggtgtggaggcctggctaagtattgaccaatgagcaggagtaggggccagagcttggagccctcaggtgataggtgaccaggctgttgttccactttgaaatgcaggccccagactaaggacggcagcgaagcagagctccctcgttggtgcagaggttccctaagctcctgggcattcctaagaactgaggtttgcctttattcttctcatggctcatgttacagccattcactccagaaagcctggcacgtcatggaccgttcaaggctgtgctccatagagtaatgatgcctccagctatgcgaggctttgggcccacccttcccactgcccctgagggctaaggggagcccttccctctgttcctgcctgctcaccagtgtgcctttattagttcggtggagaaacctcggtaagcaggaggcataagtccagccacagaaaccctgtgcagatgaggctggggatgtagtgagtgctgcagaagtgagtgactcagacacagaagagcttcgggtgacaagcactaggacatagcattggatgggggggaggtgggacaaggagagtactgcctgtcctgatgtctgtcttccctagctcccagctcttcaccgatggggatcattgtggctgtggtcactgggattgctgtagcggccattgttgctgctgtagtggccttgatctactgcaggaaaaagcggatttcaggtttgtagctcctcccggtcccttttgttatcagtttccacttggcccaggccctaaccccagacattgccagaatccctctctttgggctagatacacattcagatctaggcccgtattgtattatagtcattcattcgtttattagatcattcatttgacaagacttgaacaaactagcttatgtgtcagccaatgcgtgagacatggtgggtgatgccaagagaagtccagtccctgcccttggggagttctcagcattgtgaggaagacagggtcattataataagatgggataagagcaatgatagggacatgaaaagcctaggatagaagtacagaggaggctccatagcccaacaagggctgaggcagttggagaaggtcttggggagagcagtgtagtgtagtgatggagtgcacatagtggggccagactgccttggttcaaatctagttctacagcataccaactatatgacccaagtgagtcactccacctctctgtgcctcagctgtctcatgtggaaaatggggacactaataggacttacctcagagggttgccatggggatgaaagaggctgatgctcttacacagtgcctggtaggcagtaacagcacacaaacagggctgttgccattctggaggaggtggtgtgtgagggcagcgcttagctagggaaggaggaccctccaggcactgggccaaggcagggattgaagccgggtggggctcatatgggtgtcgaagggggagtagagagggtactgcaagccaccaagaaagaaagaatcccgctaacacctcacaaagcacttttcaattggttcatagccaacacctcagttactgatgataagtaaatacagagaaacagagagagagagactgagacacaggggtgtttttaaaaggcagagcaagcctcagacagatgccatggcgtggactttctgacactcctgggcatccccatgggtgagctgaattctgcctctggaccagcccttttccaggcgggagcagcctctgagcaggggagctgggggtgggaggacaggaaacatctgccagagtgaaggcctgagctggtcccatccaaccctggccctggtccttggtcctgaggactcaggccccaccgcctaatcctactaacctcctgtgtgcccctcccagctctcccaggataccctgagtgcagggaaatgggagagaccctccctgagaaaccaggtgagtacaggttgtctcagggattcagtgatggctcaccagggctgccggctggactggagccagggagaaggggcttgtgcaagttcagctgggagccagggagggagcagcagtgggaggatggctggggctcaaatcgcttggtcagctctgagtctaactcctgggcctaaagacgacctctctggagatgagaagagaaacaccagtcccagatacagaagagagggctgtgtccgaatttctggtaccaggaatctggtgatatttccagagcaagaaatcagagatactttggtctttctgtggagctttggcagagctggcaaaggatggggttaggggctgtaagactgaggccaatcggacgtgggaggcaggagtctaaggggaaaggaggaggaggcctggaaaccccttgatttgctgaggaatctgcctctgtggagggatggggtggagtggccaggctcagctgtctgtggaacactaggaggaggtttgggcttgagaaaattctgggggactaggggcactagtgggctctactctgtgggcaaaactcagttctgatgcccatgcactcaaggttgactgaattttggcctggttctgccctcatcacacagtggagccctgagcaagtcagtctccctgatggggttcagtctcctcactgaggaaatgagtgggtggccagggtgacctctcaggtcttctagatttgacattctgagaaccaggggccacccaagccctggcccaggtgggagtgtgtaaaggaacttccaggaggatgccaggcaacttccagactgtagttaaagtcagagcacaaaggaaaccagtgctttctctgggggcttccatgacagtaagaacaggcagaaaaaagaggctgtcaaagaccccacctcagatggctggagtatgattcagagcagagccaacagatttaagagcttgagcaaaatatcacttgttcagctgtgcttgcagcaaggtcgcatgtctgctggccaggcccagtggtgataggggcctgtgttcacaccagggccaaaacagatctggaaaaaacaaagtccaagcaactggattatccatcttgttgtgtggttctgtctgcactggcataagcacatttcacaaggcacttttgcagccaggcattggggctgcataaatggttttttaaaaatcctttcccaaaaggcaaagctgggttgctgggattcttgggaaatgtaatagaatgggaattcagaatgcggtttactgcagaatttacagcatggcaataaaggctctctatgttcagggggtgagagaagagactagatgcattgtctcagatgtctcctgacttcctgagaaatgccactttgcagatatggggctgcttttcacactggctaagtcagttcatggcaaaatatgagggaattcagtgtgtttcagacactaaccaaagtccatccttcctttctccttccgtccctcccttcctccctttctcactcactctctctttctttttaatgccatggagtaccatatttttcaaagttccaacaaagatgcactacatttagacaatgtggaaatggccctcagccttctctccctgaagtctgtggccagcaaaaatctggactttacttcactctgatgctgaacacccccctcccccacctcttccccaatatctcagatcccaagcctccctggtttgcttctaggaaagctcagcaattccctgaaaagaatgcagctcaagtgactgctccactttttcaccttggcctttgcggaaggctgtggctgggctaccctatgcatcgatcaatgaggtcatatttacccagtgcttggcctagaggcccaagacagggtcagcagtgcttgctttggctctagtttgggcgttggttttgcagcctcagcatcagcacaggcaggccctcttctccagcagtgctctggctgatatttcttctttttcccacagccaatcccactaatcctgatgaggctgacaaagttggggtgagtgatcccagccatctccccctcccttctcccctgttgccttttctgttgccttctttcctaggccctctctgtggatccttactgctggtttctgccttctctaggctgagaacacaatcacctattcacttctcatgcacccggatgctctggaagagcctgatgaccagaaccgtatttagtctccattgtcttgcattgggatttgagaagaaaatcagagagggaagatctggtatttcctggcctaaattccccttggggaggacagggagatgctgcagttccaaaagagaaggtttcttccagagtcatctacctgagtcctgaagctccctgtcctgaaagccacagacaatatggtcccaaatgaccgactgcaccttctgtgcttcagctcttcttgacatcaaggctcttccgttccacatccacacagccaatccaattaatcaaaccactgttattaacagataatagcaacttgggaaatgcttatgttacaggttacgtgagaacaatcatgtaaatctatatgatttcagaaatgttaaaatagactaacctctaccagcacattaaaagtgattgtttctgggtgataaaattattgatgatttttattttctttatttttctataaagatcatatattacttttataataaaacattataaaaacaacattctgtttaccttttcaaggctgtattggttggagtgtagactgaactgcctggggtctgtttctcttcagtgatgagactcttaggaaggcaggaatggataggatagggggaggagaggagagatggggatttagaatgtagagtgagtgccccttttcttaaaactgaatacagtcacgcaccacataatgatgtttagttcaacaacagactgcatatatgatggtgatcccataaaattataataccatatttctattgtaccttttctattcctatgtttagatatatgagtacttaccattgtgttacaattgcctaaagtattcagtacagtagcatgctgtacaggtttgtagcctaggggcaataggctatacgctacagcctaggtgtgtagtaggccacaccatttaggtttgtataagtacctgctatgatgttcacacaacaaaattgcctgcatttctcaaaatgtatccccatatttcaacaatgcatgactgtactcttctgccaatgaccttgtattcttgtttccatgtcttcttctctttcctcctatggcaaataaaacactgttttgcaacacaagttcacgggaagtcaaacttcagatgagccctgagtggagattgctgacatgtcctgctctgctattctcccaatgtagttaccagaaggatgtgaccttctcagagaagtcatctcaggcagattagaaacatgactggcagtctccttgagggtttggtgagtgcccttggagaggcttcattttcctgggactctacgcagtaacatcgtgcaacatttgttgcactttttatggtaggataaaaagtactcactttttatggtcccacaatcagatttcatacacacttattgttttagtaataagggataataattaaaattactgcgttattaaggacttactttgtgccatatagtttgtgccaaactatatgctttagaatttagagaatttacgattagccttttatatttcctcttttgtgagtttcctgtgtatttattctttgcccatttttgtagatacaatgtatgtccctttatttataaattgcatagtagtaacttatttccttttatttatatgtaaattatttcactacactaataatgtattctttttataaaattaagatacagatagggaaaacaaaaaaattagatcgcccataaatccataaaccagaaataattaatgctaacatttaaggatatcaatccatattcctgtctgtggcagtgtgtatttgtgttttaaaaattggatctaatcccagctactcgagaggctgagacaggagaatcgcttgaacctgggaagcagaggttgcagcgagctgagatcgcaccattgcacttcagcctgggcaacaagagtgaaactctgtctcaaaaaaaaaaaaaaattggatcatatcatatattttacatgttaataaatacactcaggcaaaaatgtatgctcattgtaagcatgtaagcccaaataatacagaaagataaggagtaaaaagtagaagttccattttgtcatcagttccctctatcctcttcccttttctttctttctttttttttttttttaagagatagggttgtagtccaggctggagtgcagtggcaggatcacagctcattgcagcctcaaactcctgggctcaagtggtcttcccacctcagccttcctagtagctgggactaccacacctggctaatttttaagaattttttggccgggcatggtggctcacgcctgtaatcccagcactttgggaggccgaggcgggtggatcatgatgtcaggagatcgagaccatcctggctaacacagtgaaaccccgtctctactaaaaaaaatacaaaaaaaaaaaaaattagctgggcttggtggcgggtgcctgtatcccagctactcgggaggctgaggcaggagaaggcgtgaacccgggaggcagagcttgtagtgagccaagattgcaccactgcactccagcctgggcgacagagactccgtctcaaaaaaaaaaaaaaaaaaagaactttttggctgggcgcggtggctcatgcctgtaatcccagcactttgggaggcaaaggtgggtggatcacctgaggtcaggagttcaagaccagcctggctaaaatggtgaagctccatctctgctgaaaatacaaaaattagctgggtgtggtggctcatgactgtttagtcccagctacttgggaagctgaggcacgagaattgcttgaacctgggaggcgaaggttgcagtgagccgagatcatgccattgcactccagcctggggaacagagagagactcggtctcaaaaaaaaaaaaatagtttgtagagacggggttttgctatgttgtctaggctgatctcaaactgtgagcctcaggcgatcctccccacttagcctcccaaagtggtgggattacaggtgtgagccacggtgcctggccctgacatgctacctaaagtctgaaacttgactcctgatccccagggtcagtttctttactgatagtttttcaataagccatttagatagttggcatgattacgtagccagagggggcataaaaatccctctaggaacttctgctttgagctctcccatagccaagattccttgtatggatcccggtggtttaatccagacaaaaagcgtaaataagttacggtaactataaggatgctagggagcttgcacatggaatctcttggactcccagtaattgcctagactttctttctcttgctatacttttaaataagcactttgtttgagcatgctcggtagagtttgatgagttctttcaaatatcctcttcaggaaggacatccctgactgcacttcccctactgctattcctctgctcttatttccttcatggtatctatcactgtatgtaatcatgcatttttttgcttaaatatttacttacaagttctaaaatgtaagctcactctgggcaggatgtttgtattattcactggtgtattccagagactagaacaatgcaatcactatttattgaatgagttaacgaatgaaataatattatatttatctaaaactcttaaatgctttaaatagatctttactatatttggaacttatttttggacttggtgtaaggtgagaacctaatataatttttccacatgaaagtcagttgttccaatatcatttgttgaacagtttaataatttgaaatcctaatttatcacctaaattcccactcataggtctatttttagcctctcttctattacattgttctatttgtctatttctgcatcaataccacatttttagttattgcaactttatagtgtactttgatatatagaaggtcaagttttctctcattcttttgtttcaaggttttcttggctactaatgtgctgcttctcttccagatgtacttaagaattccataacactattatgatattggtagaattgcattgcatttatagattatttgggtaaggtttgacatctgtgtcatattgaggcttcctaagttacaactcttcattcattcagacttacagaattttcctataatatcatatgagcttggcacatttttttgtgacagatctttgacagacttttctttctgtcatttttggtctggttatgattttctctctctcgggagtcaattttgaaaacttttgctttcctaggaatcatccattttattggtatgcagtggtacatcgcacttttcccctattttttggtaataagttgtgtgtttgtgtttatgtccctcctctcattcctaggttttgggttttctttcttttatcagttaggatgacttcagttggaaataacaggaaatcgtgattcaaattggcttaaacattaaggaaatgtattatctcacataacaaaaagtccagagacagacagtttctagcacatcagaactcttggtccacttttctacaattctgtgagcactgcccttgagctagcagcaagatgattataacggttctaagcagcatcatacccagaccactatagaaagaaagggactaactattccttttatgtgtagccttttttttttttttttttttttttgagacagagttgcagtggcgcaatttccatttactgcaatctctgccttctgggttcaagcaattttcctgcctcagcctcctgaatagctgggattaaggcatgcgccaccacacccagataatttttgtattttttagtagagaccagccaggctggtctcaaactcctgacctcaggtgatccacctgcctcggcctcccaaagtgctgggattataggcgtgagccactgtgcctggccttgtgtctctttttgacaatgaggaacattttctcagaagttctgcaaccatcttcccatcatatcatattggtcacgactgggtcacatgctcattcttaaaaccatcacgagaaaggggactgagatgaccataattcacttagcttaatcatttggagagtcacccatcctgacactatctctttgttcatcctaatcagacttaccaaaggtttgctttattagtcttgtatcagcttttgacttctggctcaagtactttgccttttgcttgttttctaatgtattatttctttcttagatttcatttatatttactgtattattcattaatttctaaacttcttgttttgaaatagattcacaaaaggctataccttttcctcttctgccattttgaccacacccattagattttgagatatatgtatccctgtcattgttgtttctaaacagtctgtaattttagttttattttcttcttaactcaaactttatttggaagggcgttttgttgtgtttgttttgttcaagagaaatgagcgctaccttttttgttttctattttattgcgggacggtcagtaaatgtggtctgtatgatttttctgtatgtgagtatctttaagtatatgtatgaagacaatattttctttcattttaaaataaagttttgttttttattatggcaacacacacccttagtttacatagtataatggaatagaaggcatataacaagaaatagctgtttattgccccttccctcacatctcagctctacttctcagaggcaaccatgttcaattctttcaactatgtcttctgctaatttacctccatatttccaaacaagacaatacgctgctatttcttgatttttcaatattagacattatctatttgatttcctactatagaatacaaggactattcttattataccgtgcttacttacttcccacttttcctaccatgtgctccaacatagctttatcacaatttatgattactccttgttgctgagacaaatagtgttgtctgcttatatttcccttcttgaacaatctttttttcctctagatataataaatgcctcattttcatatattttttagttgtctatgtgtttattagcttttccaaagatttaaaaaaagttctaaagcagcttaatactattttccatagtagtcaaatgcaccatgtagcttttcagtttttcttccttctttttttttttttccattagcaagatgtccctccttttttgacactgttttcggtcatttgatctctggacctcttgcacagctgttgtcctaggacttctctatcttttatatgaaatcctgtttcctgaatcttatgtcttcctatttcttggtttcttccttgtgtggctgcagcatgtttgccagggcatcctgagaaagggtttgcaggtgatatagtggaggccataatgcctcacctcatactcactcaactcacctgaattcacctgcagctgctggctgggtcaatttctcctgagaattaaactatgacagggaaaaattagtcacctgcaaatagtcaccctgggtaggagagaggccctaagagtctaacttctccttatacagagtttacaattatcctctcatttttagaatcattctttaaccatatattttgttgtacatgattcctccaaattcctggactttttctaagatcttccaggaaaattagcttgcttttcattagcattcctttctttagggaaataaactcaattccctattacccaattttctataacaacatgaccaagatttgtggttatcccaatgttacttcttagatattagacaaaaataatgttaaatggttaaataaaagagacatctttatatctctgtttatcttaattaggcttgtcagaagtcttttttattggtcttttcacagaattagtttttgattgtttgatcacatcttccttctgtttgcaatcttgtacattgtaatctcttctattttgtaacattcttagtcttgaataatacaaaaaaaagtatatattttccctaccacactagtctctctgtttactgtactcctgtgcccactggaatgaaatgttccttaatttttctatttttgctgaaaaccacaatttcaacagataatttaaattatacaaattgttatctcaacaagattacttaagacttgtcaaacacattgtagcatacatttctgtaactgttgttagccaaataattaaactcttcaatctgcgatttctacatatccaacgagaacctatgtctttttttttttgaaggcaattttataactttatttgatgtatttgacgatcagcgattagttctcatccacattgactgtagattttcaaaagtggcaacaggtacataggtaaccaaagtgtagagcttatttggtgaatcttcatcctcattacgttttcgggacagccgcacacggattcggtatgggacattcttattcctttggcccagacagctttgttgagcctgatatcaatgcgcgcatctggagttcccatctccttcatggcaaatttccgaagctctttgagtgcccgaggggcacacttcttgaagcccactccatggatgtgcttgtgaatgttgatggtgtattctcgggtcaccacctcgttgatggcagaacggcccttttattcttgccacccttctttgcgggagccattctgccgggtccaagttggaaaggaagagcgcgagggattgagggagaaggaaagccgagaatctatgtcatttaatagatcatgctttgggtgtcaagtctaagaattctttggctagtcctacgtcccaaagaatatgttctccagttttgttttgtttttttaagttttatagttttactttccacatttaaacccaggatcacccaggcacagtggctcacacctgtaatcccagcactttgggaggccaaggcaggaggattgcttaaatccaggagtttgagaccagcctgggcagcatagtgaggcttggcctctaaaaaaaaaaaagttacctgtgaagtctcagctacttggaaggctgaggtcggagggtcggagggttgcttgagtacaggaggtcaaggctacagtgagctatgattgcaccactgcactccagcgtgggcaacagagtgagaccttatctcaaaaatgtacatgaattagtaagtacataaacccaggatccactttgagtttattttttatgagctatggtacttaagttaaagtttatttttttttcctatggatgaccaattgctccaacaatcatttgttgaaaaggccatctttcctcattgaattggttttgcacctttgtcaataatcagttgggtgtatttgggtgggcctatttcctgttctctattctgtcccattattctgtgtctatcactctgccaataccacacaatcttgattattgtagctacattgtaagttttaaaattggttagactgattcctcccaatattcttcttttttcaagatttttaagctattctagttcctttgtctttccatatacatttaaaaataatattgcctgcatctataaaaaatcacgctaggattttgacaagaattgtgttaaaggtgtacattagtttgggaagaattgacttctttactatattaagttttccaatccataaacacgatatgcctctccatttatttagatttttacaaactttccttcatcagtgttgtgtagtttttgtcatacaaaacctatacatgttttgttagatttatacctatttcttttttcttcttagtattgtaattgtaaatgatactattttaaatttcagagtccacatgttcattgccaatatgtagaaatacaattgattttttatcttgtatgtttatcttgtatgttgcaaccttgctgaagactcacttattagttctaggagtttttaatgtattcttgggattttctaggtagacaatcacatcatatataagcaggggcattttatttctttctttcctacccatatgccttttattttcttctcttatcttagtgaactggctagaacttccagcattatgttgaataagagtggtactagcagacatctttactttgttttgattttagggggaaagcatgcagtctttcattgttgagtatgttgttagccaaaagtctgtgtagatgctctttatcaagttgaggaagtttccctctatgccctctcctttttgcttgtttctttttttaatttttttttagactttccatcaggaataggtgttaattttgttgatttttttgcattgattgacaggattttttatggtttgacatgatttttgatgtgatttttcttctttagcatgttaacatgatggattacattgattgattttgaaatattgaaccagtcttgcattccaggaataaaccccacttggtcatggtgtataattctttttatatgttactaaattctatttgctaatatttggtttagtatttttgcacctatagtcatgaaaaatattagtctgtagttttcttgtgtgtgtgtgtgtgtgtgtgtgtgtgtctgtgtgtgtgtattaaacctgtatgtgtctttagcccaagatatgatatgtccatcttggtatatgtgtcatgggcacttagaaagaatgtgtagtctttgtctggctttggtatcaggataaactaactttgtaaaatgaattggaatgtgttccttcctattctatattctgaaaaacattgtatagaattggctaattccttagccgggcgcggtggcgggtgcctgtagtcccagctactcgggaggctgaggcaggagaatggcgtgaacccgggaagcggagcttgcagtgagccgagattgcgccactgcagtccgcagtccagcctgggcgacagagcgagactccgtctcaaaaaaaaaaaaaaaaaaaaaagaattggctaattcttcttcaaatgtttggcagaattcaccagtaaaaccatctaggactggagatttctttttggggagttttaaaattatgaattcaatttcccttataattacacagctacacaagaatccatttcattctggatgaactgtggcagtttgtgctttttgaggaattatttcatctaagttggcaaatttatgtgtttaaaattataggccaggcacagtggctcatgactgtaatcctagcaccttgggaggccgagatgggaaaactgcttgaggccaggagtttgacaccagctttggcaacatagtgagattcccatctctattttttaaaaaataaatatgggccaggagcagtggctcactcctgtaatcctagcactttcagaggctgaggcaggcagatcacctgaggtcaggagtttgagaccagcctgactaacatggtgaaaccctgcctctactgaaaataccaaaattagcctggtatggtggggtttgcctgtagttccagctacttgggaggctgaggcaggagaatcacttgaacctgggaggcggaggctgtagtgagctaagatcacaccactgcactctgcctgggtgacagagggatactctgtctaaaaaagtaataataaaaatatatataataaaaataaatacataaaattatagtattcccttattctccttttgatatctgctggtttattggtaacttgtatctttgctctgtcagtcttgcttgaggtttgtcaattttatcttttcaatgaagatcaattttctctatttcttatttattttctctattgtttttctgtcatcaatttcactgttttgtgtgcttatctttattcttgcctcccttctgcttgctttgggtttattttgctcttctttttttagattcttgaggtgggagcttagattattgatttgagatttttctctatgcaattagtgctataaatttccattccaatactgttttaattgtgtcccacaaatttttatatgtcgtattttcatttttattccatttagtgtattttattttatttcccttgagacttcctctttgacccatggattatgcagaagtatgttgtttggtttccaggtacttagagacgttcctgttatcttt

SEQ ID NO: 1302 - DNA, 1379 bp, Homo sapiens
gtatcctgaacacctattatgtgctaggggctattgtagatacatgacactatcatgctcattttcacgaatgaggaaactgaggctcagaagacttaaattatttgcccaagagttcataaatgacagagccagcattagagtccaggactgtctgatttcagacctaagctgttccctctgcacatcgtgtcccaccagtaaggaagatctgggtctcagagctgagccaagacctcccgggtcctctgcggttttttgtgtctttcagagtggctggtgctccagacccctcacctggagttccaggagggagaaaccatcgtgctgaggtgccacagctggaaggacaagcctctggtcaaggtcacattcttccagaatggaaaatccaagaaattttcccgttcggatcccaacttctccatcccacaagcaaaccacagtcacagtggtgattaccactgcacaggaaacataggctacacgctgtactcatccaagcctgtgaccatcactgtccaagctcccagctcttcaccgatggggatcattgtggctgtggtcactgggattgctgtagcggccattgttgctgctgtagtggccttgatctactgcaggaaaaagcggatttcagctctcccaggataccctgagtgcagggaaatgggagagaccctccctgagaaaccagccaatcccactaatcctgatgaggctgacaaagttggggctgagaacacaatcacctattcacttctcatgcacccggatgctctggaagagcctgatgaccagaaccgtatttagtctccattgtcttgcattgggatttgagaagaaaatcagagagggaagatctggtatttcctggcctaaattccccttggggaggacagggagatgctgcagttccaaaagagaaggtttcttccagagtcatctacctgagtcctgaagctccctgtcctgaaagccacagacaatatggtcccaaatgaccgactgcaccttctgtgcttcagctcttcttgacatcaaggctcttccgttccacatccacacagccaatccaattaatcaaaccactgttattaacagataatagcaacttgggaaatgcttatgttacagtgttaaaatagactaacctctaccagcacattaaaagtgattgtttctgggtgataaaattattgatgatttttattttctttatttttctataaagatcatatattacttttataataaaacattataaaaacaacattctgtttaccttttcaaggctgtattggttggagtgtagactgaactgcctggggtctgtttctcttcagtgatgagactcttaggaaggcaggaatggatag

SEQ ID NO: 1303 - protein, 190 aa, Homo sapiens
AKTSRVLCGFLCLSEWLVLQTPHLEFQEGETIVLRCHSWKDKPLVKVTFFQNGKSKKFSRSDPNFSIPQANHSHSGDYHCTGNIGYTKSKPVTITVQAPSSSPMGIIVAVVTGIAVAAIVAAVVIYCRKKRISALPGYPECREMGETLPEKPANPTNPDEADKVGAENTITYSLLMHPDALEEPDDQNRI

SEQ ID NO: 1304 - DNA, 1322 bp, Homo sapiens
gtatcctgaacacctattatgtgctaggggctattgtagatacatgacactatcatgctcattttcacgaatgaggaaactgaggctcagaagacttaaattatttgcccaagagttcataaatgacagagccagcattagagtccaggactgtctgatttcagacctaagctgttccctctgcacatcgtgtcccaccagtaaggaagatctgggtctcagagctgagccaagacctcccgggtcctctgcggttttttgtgtctttcagagtggctggtgctccagacccctcacctggagttccaggagggagaaaccatcgtgctgaggtgccacagctggaaggacaagcctctggtcaaggtcacattcttccagaatggaaaatccaagaaattttcccgttcggatcccaacttctccatcccacaagcaaaccacagtcacagtggtgattaccactgcacaggaaacataggctacacgctgtactcatccaagcctgtgaccatcactgtccaagctcccagctcttcaccgatggggatcattgtggctgtggtcactgggattgctgtagcggccattgttgctgctgtagtggccttgatctactgcaggaaaaagcggatttcagccaatcccactaatcctgatgaggctgacaaagttggggctgagaacacaatcacctattcacttctcatgcacccggatgctctggaagagcctgatgaccagaaccgtatttagtctccattgtcttgcattgggatttgagaagaaaatcagagagggaagatctggtatttcctggcctaaattccccttggggaggacagggagatgctgcagttccaaaagagaaggtttcttccagagtcatctacctgagtcctgaagctccctgtcctgaaagccacagacaatatggtcccaaatgaccgactgcaccttctgtgcttcagctcttcttgacatcaaggctcttccgttccacatccacacagccaatccaattaatcaaaccactgttattaacagataatagcaacttgggaaatgcttatgttacagtgttaaaatagactaacctctaccagcacattaaaagtgattgtttctgggtgataaaattattgatgatttttattttctttatttttctataaagatcatatattacttttataataaaacattataaaaacaacattctgtttaccttttcaaggctgtattggttggagtgtagactgaactgcctggggtctgtttctcttcagtgatgagactcttaggaaggcaggaatggatag

SEQ ID NO: 1305 - protein, 171 aa, Homo sapiens
AKTSRVLCGFLCLSEWLVLQTPHLEFQEGETIVLRCHSWKDKPLVKVTFFQNGKSKKFSRSDPNFSIPQANHSHSGDYHCTGNIGYTKSKPVTITVQAPSSSPMGIIVAVVTGIAVAAIVAAVVIYCRKKRISANPTNPDEADKVGAENTITYSLLMHPDALEEPDDQNRI

SEQ ID NO: 1306 - DNA, 1797 bp, Homo sapiens
gtatcctgaacacctattatgtgctaggggctattgtagatacatgacactatcatgctcattttcacgaatgaggaaactgaggctcagaagacttaaattatttgcccaagagttcataaatgacagagccagcattagagtccaggactgtctgatttcagacctaagctgttccctctgcacatcgtgtcccaccagtaaggaagatctgggtctcagagctgagccaagacctcccgggtcctctgcggttttttgtgtctttcagagtggctggtgctccagacccctcacctggagttccaggagggagaaaccatcgtgctgaggtgccacagctggaaggacaagcctctggtcaaggtcacattcttccagaatggaaaatccaagaaattttcccgttcggatcccaacttctccatcccacaagcaaaccacagtcacagtggtgattaccactgcacaggaaacataggctacacgctgtactcatccaagcctgtgaccatcactgtccaagctcccagctcttcaccgatggggatcattgtggctgtggtcactgggattgctgtagcggccattgttgctgctgtagtggccttgatctactgcaggaaaaagcggatttcagccaatcccactaatcctgatgaggctgacaaagttggggctgagaacacaatcacctattcacttctcatgcacccggatgctctggaagagcctgatgaccagaaccgtatttagtctccattgtcttgcattgggatttgagaagaaaatcagagagggaagatctggtatttcctggcctaaattccccttggggaggacagggagatgctgcagttccaaaagagaaggtttcttccagagtcatctacctgagtcctgaagctccctgtcctgaaagccacagacaatatggtcccaaatgaccgactgcaccttctgtgcttcagctcttcttgacatcaaggctcttccgttccacatccacacagccaatccaattaatcaaaccactgttattaacagataatagcaacttgggaaatgcttatgttacaggttacgtgagaacaatcatgtaaatctatatgatttcagaaatgttaaaatagactaacctctaccagcacattaaaagtgattgtttctgggtgataaaattattgatgatttttattttctttatttttctataaagatcatatattacttttataataaaacattataaaaacaacattctgtttaccttttcaaggctgtattggttggagtgtagactgaactgcctggggtctgtttctcttcagtgatgagactcttaggaaggcaggaatggataggatagggggaggagaggagagatggggatttagaatgtagagtgagtgccccttttcttaaaactgaatacagtcacgcaccacataatgatgtttagttcaacaacagactgcatatatgatggtgatcccataaaattataataccatatttctattgtaccttttctattcctatgtttagatatatgagtacttaccattgtgttacaattgcctaaagtattcagtacagtagcatgctgtacaggtttgtagcctaggggcaataggctatacgctacagcctaggtgtgtagtaggccacaccatttaggtttgtataagtacctgctatgatgttcacacaacaaaattgcctgcatttctcaaaatgtatccccatatttcaacaatgcatgactgtactcttctgccaatgaccttgtattct

SEQ ID NO: 1307 - protein, 171 aa, Homo sapiens; identical to SEQ ID NO: 1305

SEQ ID NO: 1308 - DNA, 1914 bp, Homo sapiens
gtatcctgaacacctattatgtgctaggggctattgtagatacatgacactatcatgctcattttcacgaatgaggaaactgaggctcagaagacttaaattatttgcccaagagttcataaatgacagagccagcattagagtccaggactgtctgatttcagacctaagctgttccctctgcacatcgtgtcccaccagtaaggaagatctgggtctcagagctgagccaagacctcccgggtcctctgcggttttttgtgtctttcagagtggctggtgctccagacccctcacctggagttccaggagggagaaaccatcgtgctgaggtgccacagctggaaggacaagcctctggtcaaggtcacattcttccagaatggaaaatccaagaaattttcccgttcggatcccaacttctccatcccacaagcaaaccacagtcacagtggtgattaccactgcacaggaaacataggctacacgctgtactcatccaagcctgtgaccatcactgtccaagctcccagctcttcaccgatggggatcattgtggctgtggtcactgggattgctgtagcggccattgttgctgctgtagtggccttgatctactgcaggaaaaagcggatttcagctctcccaggataccctgagtgcagggaaatgggagagaccctccctgagaaaccagccaatcccactaatcctgatgaggctgacaaagttggggctgagaacacaatcacctattcacttctcatgcacccggatgctctggaagagcctgatgaccagaaccgtatttagtctccattgtcttgcattgggatttgagaagaaaatcagagagggaagatctggtatttcctggcctaaattccccttggggaggacagggagatgctgcagttccaaaagagaaggtttcttccagagtcatctacctgagtcctgaagctccctgtcctgaaagccacagacaatatggtcccaaatgaccgactgcaccttctgtgcttcagctcttcttgacatcaaggctcttccgttccacatccacacagccaatccaattaatcaaaccactgttattaacagataatagcaacttgggaaatgcttatgttacaggttacgtgagaacaatcatgtaaatctatatgatttcagaaatgttaaaatagactaacctctaccagcacattaaaagtgattgtttctgggtgataaaattattgatgatttttattttctttatttttctataaagatcatatattacttttataataaaacattataaaaacaacattctgtttaccttttcaaggctgtattggttggagtgtagactgaactgcctggggtctgtttctcttcagtgatgagactcttaggaaggcaggaatggataggatagggggaggagaggagagatggggatttagaatgtagagtgagtgccccttttcttaaaactgaatacagtcacgcaccacataatgatgtttagttcaacaacagactgcatatatgatggtgatcccataaaattataataccatatttctattgtaccttttctattcctatgtttagatatatgagtacttaccattgtgttacaattgcctaaagtattcagtacagtagcatgctgtacaggtttgtagcctaggggcaataggctatacgctacagcctaggtgtgtagtaggccacaccatttaggtttgtataagtacctgctatgatgttcacacaacaaaattgcctgcatttctcaaaatgtatccccatatttcaacaatgcatgactgtactcttctgccaatgaccttgtattcttgtttccatgtcttcttctctttcctcctatggcaaataaaacactgttttgcaacacaa

SEQ ID NO: 1309 - protein, 190 aa, Homo sapiens; identical to SEQ ID NO: 1303

SEQ ID NO: 1310 - DNA, 47774 bp, Mus musculus
  misc_feature (1)...(47774): n = A,T,C or G
aaagcttttattgttttgtaaatgagagcaataagttttctagtatcagcttgtaactgaacaataccaaacaattaccaacaaaaaattaccaaaagttatttatttgtatgtgccgttaaaattggggcctatgctgtttaatattttaaaaaatgagatgaaataccatgtgaatatacaattttctgtgagtgatagaaatctgacagctaatgaatccttactataatcacaattaatgagtaaatattttactgttttttatgtctcctttttagcaattattatacaaagacaagacccaaagaaggagctcttcatttagaaacacgagaagtatattctattgatccatataacccagcaagctgatgacatgacaagttggtatataatgaaattgaaatatagtttcttatacataggtcaagatttgctttaatattttctcatagtatttttaaatcatggccttaaggaaatattattctttttcagtctttatatccatgaacaatattattagcttacctacttcatattccaactgacaatcttatttaaacaagcatttttctattcagtatatatgtaacaaatgtaattaataaaatgattaagaataatttaaaattattaaaaataaaataaagtcagatacggtggtatgtacctataattctagtacttaggaagtgggagaaagatcaggaatttaaggctgacatttgaatttagctatatagtgaattggaggggagagtggactgtatgaggctctgtctccaaaaaacaatcaaaaacagaaacaaaactaagagaaaatgagtaagaataaatattattaaagagaaataagcaaggaaagatgatagagaaaagaaagtgattacattgaaagtattcaccatgaaaatggcatttaagtttagttatttctttagaagttttctcataagcttcagctctttataaaattccatttagtaatagacacattcaccattcaaataaactgtatttttaaaaatcttacatgattttgtctttctgaagtcagtgatttcctaaatagaatatacaattctagggtcttaggagtttataatttaatggtaattcattctagaacacacctttggttattttagccaatttctccatctacaaatttagctccctcaaccccaaaacttaaatattactcagggaacaacttctctcagaccacccatcctctctcactatgccttagatctaacctttagactattaagataaaaaaacaaaaacaccaacagaaacccctcccattgagaaccagctttctgtctcatctgttatgtaattaaactcgtgtgtgtgtgtgtgtgtgtgtgtgtgtgtgtgtgtgtgtgtgtgtgtgtgtgtggcatgtagggacagttaaaaatcacatggagggatggaaagatgtctcaacagttagaaacacctgctggtcttccagaggacctagggttgggtttaattcttagcacctacatggcagcttacaactatataaaattccaattccagggaattagcctcctctggtgactatgggtaccaggtacacataaggtgcacaaacatacatgaacgcaaaatagcctgtagttgtttgaataaaaatggtcactattaggcccatagagagtagcactattagaaggctgttgtagtagttatggccttgttggagaaagtatgtctcattctcttctttttttgttgcctgcagatcaagatgtagaactctcagctacctcttcagcaccatatctgcttacatgccaccaagctaccctccacgacaataatggactaaacctctgatttgtaagccagccccaattaaatgtttttctctataagagttgtcaaagttatggtgtctcttcacagcaatagaaacccaaaataagacagaagttgaaactagggactggggtattgttgtgatagacctgaccatgcttttgtttggagacatgtggactttgggtttggaaagcagtggaatgctttaagcacagtttaatagaccaccctagaaggagcacagaagacaatgatgtttagggtgatttgaactatgagggcctggttcaagaggtttcagataagaagaactttagtatgtggcctacagattgttcttgtgatatttcagagaaggtagtggctgctctctgctcttgtcaaaaaaaaaaaaaaaaaaattgcccatggctaaatggaagagtttggataaattttatgttggcaaaggagatctcagaacagtctagattgactctgttgtgcagttactagtggtcacttttatgcagacctataactaataggagcaagctgagcaaggaaaaatacaaaatgtaacatttgaggagaaaaggaacacggaaagtgtcaacagtttaaaggaaagcaagaccctacctaactaagcttcctgtttgtaaaaaagaattaaagaaaagtgaaagggaattaaagaaacgtttagggcaaagcatggtagtgtacacttttaatcccagagtttaaggttagcctggtctgcaaagcaagttgcaggacagccatgcttatgcaatgaagaaagtttctaaaacagaaagatagtgaaaaattatttgaatgagggccccagccaacaacatatcatggtggctttggctatgtggttctggctgtaaagtcaaggatacaagaaaggggtcatggactcttctgttgtggctaggaaaagctaaagaggccagacatgtgtcaggagtgtccctgcatggagacctagagaggtcattgtgtgaagctatgaaggtgaagcctggattgccttgaagaccccaaaatgttggagataccagagctgtgggataccttcaaaggagagctgctaacagagaatggaatcagtccatgagaaagaggcatattgcagtcaacaaagatgaaaggagttggaggtctgaagaatattttaacttcagacatggagatacagagtttgcccagatagtttttgattcagaatttcttcgatgctcccctttatatttataatgtatatcctatgacattatattgaggcccacagagaagaacaacaaacagaactcatgggatgtggcacaatcatgatgggtgtgcctcagagaggcagagctccaaggactagatgtcttgaggacttgatgctgttatggaaatcgctctatagttctctcaaacatcatgctgctcctaaactatgagttgtatgaaaactctaaggggtctcccagcccctgactgggcagtatctttgacacttagcaataatagtgattgatctttttcaagctttgctgctggtgcagatgaatgattcatttataaacctcagtaagacttagagttatacatgtctagtaacattcaccacccttagaaagaatttggagatatggattgttaggaaagttaggttaagatgtttttgctagtatatttgatatagaaaattttagagaacaatctgaagtccagaaaggaacattcttaatagttgggctaggaaaattttgaggtcaggggataagaacaatggaagcccaacattggctgacatgcctctcttgctaaagctgggctaatgatcaaggtgatgattaatttcatgtactcatttttgccctcagcttcctggtattgattaaataaaaaattgttaatgagtagatgtgcaccctaaggatttaaagtagaagtgactgattttttctataaaaatttagatttgtgattcctttaagatttttataagattactttttaagataaaattattctttctttgcaactgcaaatttctgcctgccagtaaaagaaactggctgagaaaattagcctgcttgcttatactttgttaatatataacaagtgcttgcttacaaatgcatgtgggtttttgaaaatattttttaatacatgatacataaagcatttgatcatgagatgatatagggggacactttttttcttttctttttctatgtatactcactgtaatttttcacttaaagaaaaatggaatgttgtcacattgtaatttttatcctgcttgagagattttggtgagtcacataagctatgggggaaaataaagttaagagaacttgtataataattaagaagattctgtatctgtgtgttctgctgactccatgccccctacttcagactctgatgtgtcaaagctggatatccttatatgttggaagtatgtgatctgctttttgattttgattttacaggaattaaagttaaaagaatggatgagtctcagaagaagctttgaactttggactttcaaacaagtttgagattgttatagactatggggacttctgagattggagtcaatgcattttgcattatgatatggctaaatcctattgggtccaggaagtagaatgtggtagtttgaacaaaatggcccctataggcctattgggagttggactattaggaagcttgcccttgttggagtaaatatggccttgttgaaggaagtgtgtttcatttacttttttgctgcctgaggatcaatatgtagaactctcagctacctctctagcactatgtctgactgcatgctgccaactttcttcccatgacaataatggactagaactctgaactgtaagcctgccacaattaaaagtttttctttataagagttgccatggtcagagtgtctcttcatagcaatagaaaaccaaattaaggcacatccagacacagaaaataattaaaaagaaaataacctctacaggaactgaagactaatattacatcccaaggaatctgtcctatctcctagtctcttctctttctggcttcaccctctagaaaacactctctaaacactgatgaaaatatttgctgacaatgtgaaacctataacttttgtattccaatgccagctacatttctgcttaactgctggggtgcccggtacgctgatcaggggaggcagaacacagtccatcatagggggtctccgtccatgtttccctgggtgagaaacagaggagtctgagatggagatgctgtggttcctagtcacctgtgtacccaggtgctgccagcactgctgggatttgggaacagggctctgcgggtttgagctttccctctccaggcaggaaggaggaaggctgagaccttgatggaagcaaaattccaagtgactgccaatagtaaggacagcttggaaggaaaaagcccttctctaaaagatttaggatatttatgctgaaggccttccctgaggaggtccttcatgaaggagacagtccttgcttgtccaaactgtttttatttgatggcagcggtgaatgcatacaccttacccagggtaaatcaggcattaaataccttttttggaaaggaaagcccaggaaggtatgctcatttggctaaacatttgggagcctatctagaaactgcattagcatggagaactccaggttttaatgttatgtgacccattgtcatggtcctctcagggcaggtgacatggttacgtgttccggatcaggtaattttccagggagtgggctccacacataccattctaaattttaagattccctggggtttgagcctactcaaccttaacagttcttctgtctggtggcatagttcacttgccacacattctagtacatattgcttctgtggtcaacaattccttcaaacaggccatttaatagatgtgctttatcaccttaggacaaaagcatgcaaacaaaccattggaaatagtaaaggaaatgagaagacagtaaaacctgcagtgtctgactagttttggagctttggataggaataatctacctcagtgtttcttagacgggatggttttgtctagagtcattgtggtagttaaaactagaggagggaaatacacctggtacccagtgggtagaggacaaggctgcaggcaaacacactacaattcacatggaagtcatttataatgaaatatttaattgattaaagaacagtggggacatcaagcagaattacataggttgctaaaacttaggaaactccccttgtgatcagatactagggaaatctgggttccctcttggagttcttaatctcattaataaaataaaccaagaatggaatcaaacaggagctcaaggacaattttactaaactttcacagaaactgttccccagactctgtaagttgtagacctcagcagttacccagaagagggaaatagagaagaaaacaattcatgccagttgagttataccatcatggaggtcagccatattgtggcaggcaatcacacggtagagaggatgtctgtagaaaaagagtgaaacacaaagtatttgggaaacctaaagtgttagggaaagtatgcttagaagagaggtagaaagaaggactggagggatggcttactgggtaggagtactggttgctattccagaacactaggcttcaattccaactccacataatgctaacactccacataatgtaactcccaaactgaagagatctgaatctctcttctggtccctgtatgtactgaacataggcagtgcacagacaaacatgtattcaggcaaaaaacatccatacacataaaagcaagtaaataaaaatgtagaaacaaacaaacaataacaacaacaaaaccaaagaaagaaaagaaaaagaaagaaaatgaagtcattcttttctgtgtgcttcaaaaaagttggtgacttacaaatcaacaatagctatactctgtaaaagattataatggagcatggggcggcgggggggggggtgtagaaatttcgggaaggcaaaaaaaagcaaagtatctcatttaagtgataatttttctaactatctctttagcacggctttatgtgagcctacctttctagaggcggtcttttggccaggtgattgatcttgtccaactggaatattagtcatctatacaggccaggtattttaattttttgaccagaaggattatcccttaatacgttgttatcctagcacaaggatcgaaatgaaataaattgtcattaaagtaatgggaaggctaggctgactccatgataagcttcagattggcagttcaggggacgaggcctaaatctctgtttccaagaactgggcaaatccaggcaagtctaggcctcagaagctgccctgccacctggcctgaagcaaggacaatgggtcagcagcagtttccagacttcctcagcaagtttccagacttctccagcaacagcttctagcccctccaggtcccagcaatggagtatcattagagatagccaagattaagatagaggtcacctaaccctccctggaattcccctaatgtgctttaaaacaggcctgggagctcactttgggatcgctctatctttgtagatggtagaccccagcatgctgaacttctgcaaaataaaacactctttgcgtttacatattatttgagactgcagtatcattcttcagagaatcagggaccctgtcttagtcagggtttctattcctgcacaaacatcatgaccaataagtaagttcaggatgaaagggtttattcagcttacactttccacattgctgttaatcactaaaggttgtcaggactggaactcaagcaggtcaggaagcaggagctgatgcagaggccatggagggatgttacttactggcttgcttcccctggcttgctcagcctgctctcttatagaacccaagactatgagtccagagatggtcccaccctcaaggggccttcccccttgatcactaattgagaaaatgcctcacagctggatctcatggaggcacttccccaactgaagctcctttctctgtgataactccagcctgtgtcaagttgacacacaaaaccagtcagtacagtcccttacagtaagaccagttgtcactaattcttcgtttttcactagccacactcagcgttagagcaatggaggcaaaataatagagaattgaaatttttgttgttctgtccaataagtactgtaagtgaaggtgtatataaaatggtgactgtaaggatggagcacaaacttaatctagcaagagaccagttgtggcaggtctatgggtttgcagacactgtgaaatggagattttgagaatcaggacactgggagtgaaccagaagggtaggacttgtggttaagagggatagttaagctcatggagaggacacagttataatgacagttctaggatattctcatgagccttggtggcatagtagagtggaggacaagatcataggcaaagataatttaaggaacggtgaagccaagcatgtggaaaaaagtttctgtaatctttgaagccaatgaggagtgagagaagaggagcattgttggaagtaaatatcagccaggagctaaacccatcaaggactcagggaagaaagtggatgctaaaatgtaacctccaaacaatgtggggatagcagtgtattctgatagcatatggtgcaagaaagtatacttacctgcaatataacttcttccatactttttcgagaataacttaaattctaaatccaaagtgctagcaggactggttccatatgaaagcttcggggaagaatctgcttatttgttccacattttagaggctgctatcatttgctctctggaggcagcaactttgatctctgccctcattgttcttcctctctgatttaggactatgttcctgtaaggttccttagggttattaagcccactttggcagacaggattacctccccacttaaatgttcttgatttaatttaattagccatttcttttcctgccgtataaagtacctatcacaggttctgaaaacagaatgtggacatgtttgttcgcatgtcctatttctctcttggaatatttgagttcttaattctattccccaaacttggctctttatatttgttatttctagaagcactaccaccaatctctgagtagggctctctctctctctctctctctctctctctcattagtattaagaaaggaattaaaattcagtgcaaatcctgtttattccatttctgaaaacttattaattgttcatctgccatcaaatctcacttggatgatggcaaggcctggcttcgctccctgattcattactgcactatcctggtctaggctgaatagcactgacatggttgtgaacaaaaacttccggaaagaaactgcgtctgactgtgaaaggaaattcctgaaagttaactgtttctgcaaagactattggctgattagaatttcagtactctggagagattgcaattttgctggtccagagaccaataattaccttatcttgggctaagtcagaactaacatcatgatacaatagatacaaaacaaacaaacaaacaaacaaacaaaaccacaaacaaccttttagaatctactgacttatcaggcaactagcttctaccaatacaaaagccgagtgccattagagtcatcctgagcctatagaaaagcttccactacctgcttcttgtatgtacccaacaatatattttaaacttgccttaatttgtgactttctctgctctgtaaaaccacaaaaactttatgaaactgcttccatgaaatttggggtgaccatatcattgttccagggtcatgatcactcaaaatggcttcagaataaactcctaatccttttaagatgagagctatggtttttacctttcattttttgtttccagcggcacgttacatccgaattcatcataaggaaataggttcttactgtatactagacagggtatgcaactgtcagctcactgttgcagattagggttaggctccacccttgcagatttttaaaaggagtaaggccgggctatatgcaaaccgagttcccataatgccttgttttctttggagtcgaaggttcctgcaagtggaaaacttcctggagctgacctactaggtattgaaccagtttctgcattgctgaatcaatctcccaagggtaattccacagaaatcccaggggcttggagtaaacaagaccgcgcctagcccagctagaggaagttttattccggaacccagcgccatttctgggtgggactgctttctacaccatttgccgtaaaacgttgtttgagaacggtgtgaggggaatggaggtctcttctcggagttcagagcctctggatccggtgtggctccttgtagccttcggccggggaggagtcaagctagaagttttgctgctgttcttgctgccatttactttgggtgagctgcggggaggcctggggaagcacggacacacggttcaccgggaacccgcggtaaataggctctgcgcagactccaacgctggtctgggctgcctgtgagtgctcagcgcccctttcccatgggtgagcgtggggcgccctctacccagatcttgggtcgtacgcagccggcaggaacgcgtggtctcccagctgcttgtctttattagctgtacgctgtgcttttctgtgctgaatgtagtgagagaaacggtgtggggagcagggggttgcaggaatattgagagatgcaatttctaatcctagaatttggttatgaggaaagttaatatttttgtgtttccttatctgtgaaatggagatattgatgtctttcgtggtattggtatttaataggtgccatcaaatatctaacccaatttcagctccttaatttatttctatcttgagacattccctatgcactttctccgaaggcctagacaaacaggcccagggatacagttttcacacagtgagactgtgtactttatctcccaccccaaatcctcattaactcccttgagcttccactttaaggaaggtccttccactcccactccaaggtaagatttgaaaagctagcaagcctcaaggtgcaatgaaatatttgcaagtagaaaagactgtagaatttacatattaaattttactgatggttaagaacaaaatagagtgcccattttacccaccatgaaagttctaatttccctttcctttctccttaatcagaactttctaagagaaagacttccttgaagtcttttgcattgtttgttttttattgtatttccaaagttaaatgaaaatgatttttttccaacatatagttattggttacatattatttgactctctctgccacataattaatgctgctaagacttaaaagaaaataactgagtctagaagttaaatcaaaatatgtattggaaagtacattaacaaaatgaaatgcagtttcattttttaaattatattattttttccccgttgaccatagtactgatccattcctgagtgccagagaggaggatcatgcatggtccattgtagctagctggagaactgagagtatgagggatgatgcaagttcttttatccaatgtaatgttgctgtgtctcattcaacaggtcactgcccagccccatcacagcttccttctgccaaacctataaatctaactgatgaatccatgtttcccattggaacatatttgttgtatgaatgtctcccaggatatatcaagaggcagttctctatcacctgcaaacaagactcaacctggacgagtgctgaagataagtgtatacgtgagtaactgcagaagaggctcctttgtgccaaatagtagagtcggcctcagtttgtctggattttagattatgactcattattagtaatcttatctaaggtatatagtacatgtggatcatcattcttgtcagtcaagtctttttaactgtgattctgtcttctcaattgttaataaatttaataagaatgattgtcacagggcatgcttaagagaaaatatcatcagaatatttcacttagggtgtctaactttgcacaagtgtcattaagtaatgattctgaaacaaagtgtatttaataactaagagatgaaaaatgttcagactttaaggccaataaattagaatacttagaagaatgcttcatgttttagggagccactgtgtgaaaataagaaaaaacttggatgagagttcttttggaagctagtgtctgatgaatttccccaaagtggcaaaaactttgaagtattacaaatatatatattctacagtaagttataatcaggttagaaattcataaactacagaaagttcagtttactgtacttggttccaaaattctgtttctttttcataggaaaacaatgtaaaactccttcagatcctgagaatggcttggtacatgtacacacaggcattcagtttggatcccgtattaattatacttgtaatcaagggtgagttggcaacaacatctcttcattcaagagttctggaatagcagtactactttctagtcaaatctcaggaaagacatctaatctattacttccttatttggtttttgtttgtgttgtgttttgttgtgtttgtgctacagattgaacttaagactttaaatatgctagacatatttaaacaatataattgttctacagcaaagcaatgccatcgcaatgttacctatccttaaaaggcttgaacataattgtttgattcttgattaaaatgaatagagatataacatgactttgtgggaaagatttgttatccctgttgaataagcaaaataacacatgcgttagctttccaatactatgataaaataattgaggtaatgaattaaaagaaggaaagttatattttcactcataattacagaagttttagttcatgttctcttgactctctggctttggtccattacagcaggaacatggtgaagaaggcccattcaccttatagttgccataaagaaaagagaggcaagaaagggctaaggtctcaatatcttctcctaaggcattgtcactggtgtcctaattttgtcccttaaggcctacctcttaaagattctaccacatcccaataagatcatagcctgtgagactacgcctttaatctataagcctttaggggatgtctctaactatggaaacatagaaagtgaagcactcactggttgagatagtgcagtctaagtacacagacttctgaaattcagagtggatgctgctagaagaaagaaaagcccagggagctccgaggaagatcaggccttaaatttacagcttttattagtttaccaaggttgttgacatgagtaccacagagtgttttcaaacaagaaaaattattaagagtttgattctaagtctaaaagttcaaaataaggtgttatcaggactctgttccctttgatgtctttaggggtgggatctttcttgcctcctccagcttctgggagctttaggccttctatgtctgtagagcacaactctaatttctgtgtccatctacatgattactttctttctgttctgtatgtatttatattcagtgttctctcttttcatagtgatactagttatgttgggttaggatccattctaaagaccctaaatttagcttaactacatctataaagaccctatttccaaatgatgtcacattgacagggaacaggagtttacaggatgaccatatcatttagggaatacaattcaacctcagaaatccctctttgaacatatcaagcataaagtcacaaagtatgtgctaatgttagttctcattactcaacacagagtgaaattctgaatgttaaactataggacatgaactaaatctgtgttcttatcaagatccaaataaaaatggtatttgaaagttcaaaaactttaaaacatttgcttttcaaagaacacttttgaaataacacaaatagaaaaactatctctaaagcatagaatttaaaaagatgtttccctaatatagaattcttataattccagtgaaaagacagataattttaaaataggcaaggctgagatggctcagctgttaagggtatatattgcccttgcagaggacctggggtcagttcttagcacccacatctgcctgtaactactcagctccagggaactgaaacactctcaggccttcactggtactacatgtaaatacacaaaccctcatatacacataattaaaaagaagaaatacatctttgagccaagggtggtggtgtatgtctttaaccacagcactcaggaaacagagggagacatagctctgtaaattcaaagccagtctggtctacatattgagttccaaaccagtcagcttatagtgagatcctgtctcaaaacaaaagaaaaaatgagggaaggattaaacatttttccaaaaaaaatgcataaatggtgtataagtaagacatttactgcatatattcatcaaaatacaaattataaccactttgagatactgccttacctacaaaaatatctctaaaaggaagacaataggaagtgttggcataattggaaagaaatggaagatcctatacatttctgaagtaggcaacataccaatatgtttgaaaactcccaacagtaaacaaactcgtagatctcattagagcacagtgacttgtgaaatgcttgtgaagattggatagcctgcctaccttttaaggtacaacaaaccaatgcataagcaaaaggatgatcgctcatccggaaaacatagctccacaaaatgaatttactatggcagctgtaactgacaaaggagctcaaaagatacttaaccaaaaattcaggatgacttctttgaaggaggttgtgaattgcaggagaacacagaaaatgcagggatacagtaaataaaacaaatgaaaactaaaacaaattccacagtcaaggaatacgatgagtaaactgagaatgcacacaaaggtttgaacaaagagaagaaaaatttaatgaactaaaaaaggggaagcattttgagccatcattaagcatattggtatagcttggtactctctgaaagaacaaagaaaaataaatagtcaaaaagcttacttttttaaaaaaaatgtgacagcaaacttctcaaacataaagagaaaatgaacatctagattcatgaagctataagaactctaaacagattaaatataaagagatcatttaaactgcattttgaaaggagcaagagaaaagcaatctattacaacagagggatattagttatttttctcattgctctaaccaaatacctgacaagaagcattttaagggaagagagattaacttgagctcctggtttaagggcttaatctatcacagtaggaaggcatggtagtaggaccatgaggcaactggttatatcacattggctgttaggatgcagagaaatcaagccagaagtatgaatcgggctagaaacctcaaggcctctcaagtgaccagcttcctccagcaagacctgatctctcacaagttccacgtcttcccaaaatgtaccaccaccctagaaccaaggttcaaatatgagcctgcagagggcatttcacatcttatcgataacaggaggcaatttctgtaagaacatctgtggatttctcagcaaacaacttagaacaagtagagacagctatgataaattcaaattgctaaaagaaaaaaaaaaaaacatttaacaaagaatacagtaccacaacagtcagcaaggctgtcctttagaattgagggtagttggagttcataactattagttgtctttacaagaaatattaaagtgaattcttcaagttttaaaatatgctagctttaaaataaccatagctattgtcatcacagaaacagctctcagagcaatggaaataagatagagtttattttggagccaagtatgagagtgattatggctcaggaacagattcgggttgcttaacataccatgttccaacatggtaacagtttcatgaagtttttataacagaacaacaacaacaacaaaatcttgagacatttaaaggctcattggtataaacaccagatagatgaattatagtaaaacgacctctataataggactcagatgttaaaacatccttagcctttggattggtggaagttaagaatctgtacagtctaaaaggaattttacctgctgatcagaaggacattagtcaaatggatgtgcccagagtaggggtgtgtgtgggaatctctaggaagtctcagagacatgggatggaggaggctcccaggagtcaatgcaggtgaccttcacctagatgcagtggggtcatggaacttggagaggcaggacccccagtgtaggactaaggacaccaacacacccacaaaactttcaacacaaaatttgtcctgtctaaaagaagtgcggggacaaagatgaagcagagactgaaggaatggccaaataactggcccaagtaaagacccatcccattaacaaacaccagtccctgacactattaatgatactcagttatgcttgcagacaggagcctggcctaactgtcctctgaaaataaagtcttttaaagagcaattataattagtaatattaattttcaggctatatattataccctcctcccaccatgtgttaggagtactgttgctgtgatgaaacaccatgaccaaagcaacttggaaaggaatgggtcttgtagatcttgacctggtgagaaatacacatgcctatacatataaaattctgtaaaagctttttttcccccccctgctacgtgatggtgatgctagtttttaatcctagcacttgggaggcagagacaggatctctgagtttgaagtcatgctggactatagaacaagtcccaggacagccagggctacacagagaaaccctgtctcaaaaaacaagagtctctttctcatagcaaaaggagcaggtggaatttaaatttaaaacacaccatttacagttgtatgtacaaaatgatgtgtatgtgtgaagctaataaaataggtatgagttcagttgctgggaaatgtatcatgaattgttttaattttatgatatactagataatttgcagcacattaactgagtattgtcaacattaattcagtattgctgttttaagtatcaagtctttgttcaactcctgttcagacttgagtttctttgctgaatcttgctgataaagcattcccttgtctaggtattcacattaatgcttacagagtataaatgaattcatcttagtataatatacagaaatacacataatatttcctttaccttcaagatgcttataatatctttaattataagacataggaggaaataactataatttactcagattgtgtagtaagataataaaaagagaactctcatttagttaggaaggaatgaagaaggaaatcaaaaagtccagaagaggatatttttgttgacaagaaaaaaaatatcctgaagcttctaagatggtaattcctgggaatcagcaatttaagcagacaattatttacagattacttaatatttttttcttcactcccattgttgggagtcccacaagaacaccaagctacacaaccttaagatatatccagaggacctagctcagagccatctaagatttatgtttgtggattcagtttctgtaaacttctctgagtcttgcttagttgattctgtgggttgtgttcccatggtgttcttttatttattttttatttttttattaggtatttatttcatttacatttccaatgctaccccaaaagttaatattctttattctgtgtgtagataccgcctcattggttcctcctctgctgtatgtgtcatcactgatcaaagtgttgattgggatactgaggcacctatttgtgagtgtaagttgaaatttttctgttacttttattcatgtattttaaattttcgcttgaattatataatttttgcaggactgagattgaacccagggtctcatgtatgctagaggttttctactaaagacatcaacctgcaaatttacagatatagacatgtaaattttggccttgtgcccaacaatttgcacaattttttaaactttctgtataaacttgctatctatcaacttgaccaagttttgaaatgtttacttccttgggtctttagtgtatatatttgttacagcttctgggacatgttgactataagagataatattagacctttagaggttatcttaaagcatttacttactgcaggtttttaaataagacattatttgagctgagtacattccttttggacagtgaatacaaattttgtacttttctatgagaggtgcgtggccacagaaggagctgctgctgatctggtgaggagtgaaagggttttgtagtccgaatcagtgcaggaaggacaaaggtggtgtgactggagcattcttgttatagaccaaggagaactggaaagaaaggtgcaagtctgtttggggatacattaggagggccactctgagtgttctcaacttggttattgtataaaaaaggagaaaaagatatttgtggactgacagataaaactgtgtctctgtgcttatgatcaaagagctagaagaatctgtaaactttcagtctctaaagcagatgatgatatctgatacactgtccgaaagttcctaaacaacgaaggtgagaggcctaaggccaaagcaaatgacaaagaaaaatgtcagaaacaaattgccaaaagacataggctatccttgttttctacttccaagtctgagtcaaaaataactctttaacagataaatgatcagataaaaattatattctttgattaagaaaattctaatttgctgaaagaattgctcttattatgcattttaattctaattctacacatgaaataatcatatctttttttcttttatatgtcacattgacttttaaaggccaaccaactaaatttgtaaaataagcctatcttgcttctgatgtgttatatattattatcttctatatttgtatgcagatatatgtgtgattgctaatattttttaatcttagcattataaagttgttttactatttgaaaatcaatttgtgaaaccccattttgatcattgtattaccctgtttaaatattgctgaattcaattttctaattttgcttagtatatttgtatctctgttccaagaaatactaggttataattagattttttttcttttagtatcattgtttagtttaggcatcaagattatgttggcctcatatgttcttgacattattatttcctgttccctagaataatttgtttaataataatactatatttgcttacatgtttcagtgggttcagtaacggagtagtctagatctgagtgagggggagttgttatggttattacatttttaattgctgattttattttcataataactaaaaaaaacattttacttaatgtcttattgaactaacttgggataaattttgtttttcaaggcatttactcatttctttttatgttttcttagttatcagcactatatttatcattgtgtctactcattatcattttgatgtctatagattttatagtgatacaaagttgagatattggttataacttggtcagttttgctgaagatagatcaattctgttaagctcttcaaagacaatctttaactttgttgagttttatgtagtgtgtgtctttttaattttcattcctaccatattattttctttctttcattttcttttgactcagcgttatgtacttctccactcctaaattaatgacatggctgataagataatttgttttaaacttttattttttgtaatacacttttaaacctataaatttggttcagactgttttatttactttccaaacagttatttgtctactactactgtgcacaaaagttttctaacagactaattataagtgtgatacttaatttctaaatattgggggattttccagttcattattttttcctagtttactttgaaacatattgagtcatattttatggctcagaatagggacaattttgataaagtattataatgttgttaaaaagaatggatagtggttttatgtaattttctataaatgtgatttaggaaaatgatttagaatacatttttgttttcctctatttttctcttactgataggagtacattctctaaggttcatgtaacaagttattgccggcttggtagcttaaagaagaggaatttattatcttttagtttgatgggcagaatgctcaagtcaagatatcagtaatatgcttggtgtcttctggaagccaagagagagaatctgtttttttcttctgcttttatggtttataacaactctgtctcctcgtcacattatcttctgtattgttgttgtcttttcatgttagagaataatatattagtttctataatcaaacccacaacagctaaaaccttacatatttaattcagtgtactacccttgaacaaataggaaagcattaagttttttatttctaaactgatatagctattgaaaggtgtagcctaggctagcttcagactaattggtcatctttactccacctctccaacgtatcttactgtcatgtgtcatcacagctagcactgctaaattctgtctgttataaagacaataactgcccttgtttaccacaatctaatacaaactgtacttttccaatgttcccaatacaaacaacaccaactgtgtggctctatagcttcctgctattatcttttttatgttactttttcatgcttcacaagagatgttatttttatagaaaaaattgtttgtatttatcctgcaatgaattatgctgccttggcatccattttgaatatagtagtcctacttggctacacttttacttttctgtggtttaagttaaccatgatcaaccagtccaaaaaaaaaaatcttagatacaaaattttagaagtaaataattcttaagctctaagttatgcatcactataaaaagtgcgatcaacttttatgctgtcattttctattcaacgctttcccactgagggcaaaaaagatctttttcagtatgtctgtttatactgcagatgtgaaattgttccttagccattcaatagccttcccatttatcagactactctaggtatctaggtatctagtgcttgtgttcaaataatttttatagcagcctagtgctagaacctttgccattcacttcatttcatctacagacattcagtagtagattaaaaaagccatataaacttgaacaacattcaaataattcttcatctagacacatcacaaagatataaaatctaattctatcatcctttatagcagccatgaaacaaagacagtaactgaaaggaaccaaaggagaaaatgtttcaacaatgaaagttccagatctattaaatacaaaagaatgctttttgaatctacaattctgtgatatcttttgtcagacttagaaagttcttagttattcttcagtattatgcatacttttatccctccattccctctgtgtatatgtcattccacctgagtatatgtcattcctctataccatcattccttgctaccaccactgcttgtttaaaaacaaaaacaaagaaccaaacaaaccaggagacagattactggagatcattttattcaaacttgggtttagaaaaaacggggtagaagttatgctcctgttagcacaatacatataactctcaccttaaagcagaaaagaaaatttattttggaaccagacatgaatgaccatgactgggaaacccagatttaggttgccccacattccatgatctaatatggcaacatttgatgaagttgtagtgcaaaagctacagatcttattttaaaggaacaagagatagtttattcaggagctatttttaactgactatggcccagtaaaagagatttagattttgccaaattccatgtttcaatgtggaagcagtttcatgaagttttgtatttttctagaacaaggaagtattaaatcaaggcaaacttaaagtaaattattggatatattagacaggcagttaaaatgagatggaaaaagcttttctgttgacctaaagtgatatctgataacagtcttagcttttgggttggcagaagctaatggagtgctaagttaatagattccaaaatgcttctatctactagtcacaagatgttagtagggaaggaatggttggttgttcttgggggctagaactagcccatggtaggtatttagcctctggacctacaacgtcccaatttcttcagactagaactctaatcaatcagtctctgcatatatgcagcttcttttcaggaaatttctctcacaaattttccatattaaaaaaataaggaaagccataataaaggcacttttaaaatacattggtagaaatattaagtaggtgggcttgaagcaaagcagagaaacttctatagacctcagatgctatctggtggtattcttagccttttattagtagaatccagggctgtgttaaattaatatatcccaaaaatgttttatctgttagtcactaggccactcttcttaaaagctctgttaccatcttgtcacccagtagaccaagcctttggtacattgttgttatgggaatattacctatatttctatatttaaaacacagcaataacccacactctgcagataatagttttcttttttctgtgaggctccaggacactggccagatgacactattttgattcaatgtcagaaactttaatttttcttggccatctacagtacttgaaggtttccaacctttgagatagtaggtgtcagtcatcgttgattctaagattacagttctttacaaggtatcagcagaacttccttatttaggaggccctggactccagtttttattctttgatttgataagaccaccacaaactcaatatattcttcattacctactactggttcgactccctcttccccaaggaactggaagtagcccagtacgaatcactttgactttaagaatagttagggttttttgtaaactagttcgtaaaaatcatcatatggtaagcttgaggtttcagtcctttacatgtctcaaagtacttgaaattatatatagaattatgtgttacttgaaaattgacagaatttgtggggttttcttgtattcttaagagttatttgtcaagtttagctttacatattttgcatgaatattaatggtctatattttcacttattcattacattttcaaaatgcttaatacagagtaatctacagtttcaccaattttctcatatttgcaggcatattcaaattatattttgtacttttatccatttttttcatttgcctcttattttttcttagtgaatattattttttaaaaacttcctttcagttaacaaaaattttgaaattttaggcaagaaaactaatataaactctctaatatgaccaaagagttatttcaaatgaaaaggtcaactgcataaataggaaagtcagagcacatgttattgtatgcatctaaatggcaacatttaaaaattcacctacaagtcagtaaatattaaaagcaaataaggagtgcagatatttttagttcagtgattcattaggtttaatctcttttctttgcccagggattccttgtgagatacccccaggcattcccaatggagatttcttcagttcaaccagagaagactttcattatggaatggtggttacctaccgctgcaacactgatgcgagagggaaggcgctctttaacctggtgggtgagccctccttatactgtaccagcaacgatggtgaaattggagtctggagcggccctcctcctcagtgcattgaactcaacaaatgtactcctcctccctatgttgaaaatgcagtcatgctgtctgagaacagaagcttgttttccttaagggatattgtggagtttagatgtcaccctggctttatcatgaaaggagccagcagtgtgcattgtcagtccctaaacaaatgggagccagagttaccaagctgcttcaagggtaagtctgacctgagcttcgaagtctgcaattccatgggggtattggaggactagggacagggttggttctggatgagggaatacagtgaacaggttgaatgaataaattttcttggaagggaatatgaaatcaaggagggatatatgtttgtgtgggtgggtgttcaaacaatcttataagcacatccatttgaattgagaagcagagctaaatgtgagcaaagaatgtgatacatcctgggaattatcacacactgaagttcttttcatgcattgtgatctccagcttccatcaattattcatatgcataatatttactaatatgaaatgagtgatccatgggcagttatatttaatgtatgcatatttaatttataaaacaaagctatggagtacttactattttttccatattgaggcttagaggttagataattttccaagatgatataagttgcagagcaaagattagaatctaagtctgcctgtctgccagatttttcaaagaacaaaggctttcctataggaaatgagttataaagatgttagaaggtcagaaagaataagaggaggaaagtaatgttgctaaagattagggagctactgttactatagaaatagagctgatatagctggctctgccctgtttgacactgtcactgtcagccagactctggtatacttccagaatagagccagtccttcctggtcatagctgttgctagaatctgagtgctactgctcacttgagagtcatcaagactgtctcaactgaagctgttcctggagacataaaggtgtctatcatatctcttgtcctttagtttgatatatatgtttccaggtagcagaacttaattagaggcctagagctttatttcttaacctgtgggttgaaaccactttgtcaaacctctatctctaacaatatttacattacagttcaataacagtagcaaaattacagtttcaaagtagcaaccaagataactttatgcctgggggtcatcacaatatgaggatttgtattagggtgtcacagccattaggaaggttgggaaccacttccttagagcaaagaaattgtagttttcatgcctctgcccataatagtcaaaaggctgcccaaatagtcatatagcacgaggctgggaatcaacataaatttaatcagcctagtctaaatatcacagcacaatgtattagtcaaagatgagccctcaaaggaaatttattgtagaccagtaccacatttttaactggagaagtctaaaggacagaaagaattgacttgaaatgaggctttggattgttattgtttttgttgttgttgtatttgtttgtttgggtgtatgtgtgtgtgtatctgtgtgtgtgtgtgtgtgtgtgtgtgtgcctatatgtgtgagagagagagacagacagagagggagttttcctcattttgcaacttaatgtaattgttttaagactcacatatatcctcactccttgagtgtcttatatctttagcaaaatggtaaatgctgagaccttctggatagcccttaaagctgtgggaaagaactctgaaaatatgagttcgaaaacatataatttctcaactatggattagtttctcaactatggattctcaaacataaggatgcaatatgaattgtataaggagcttcacagatctaaaggagcagaggtagctgcgctagaagccaacttgtcagaaaaatactaaggaagaagataaagagattaggggtagtgatcacagaagatctcacccagctaagttttttgttcatgctttcaaaagcaggcagattctgggtcagcctgggacagagcaaagttaggcccaggcatggtagaaatggtaatttcaaggcagattcccacccagccagtctatcctctgtgccattatcatagtagcaaaattactgaaatgttgctaaaaagatatttcttagttcatttccatggactcagagattttgttttgaagagggtcagaggctacttttaacaggtcaatcaaaatcctctgatatagaaaaaccatacttcttagaaataccactttacaaatcaggagacaattacaacagaaaaggaggctttgcttgaagttgaggaagatatttatggctgaaagaaaaataaagcaatttaaaggatgaattaaataaaataagagaaattagatagtatgtaaaattagaatcacaagttactaatttctttgttctatatacgaaagtaggctagaagcatttacctttactccacagcaaaaaaataccggtatatgttatataacaagagagttagcatgaaattgtaatttttttaaattaggtgtggcccacatggaccaagggctaaaacatggttgtcctgacatagctttctaaaaatttccagctatatagttgataatcaaagtgtcccatgttccttcactgtatacaaataaaagtcagaaaatttaagaataagattgtgagggtgacagttattctttattgaaaatatatcccattttgtagagggcgaaatctgcggttacagatgtctctataatagcaatttcaattaaccataacatactaatttccttgtgatttttctaattgcaggagtgatatgtcgtctccctcaggagatgagtggattccagaaggggttgggaatgaaaaaagaatattattatggagagaatgtaaccttggaatgtgaggatgggtatactctagaaggcagttctcaaagccagtgccagtctgatggcagctggaatcctcttctggccaaatgtgtatctcgtaagtacaaatgtagaggtggagcccttcctcactgactgcctagtcatctatctatcctggtgcctaaggtgatggggtgtgatgatatgtagtgatgagggagctgagaatgtgctgtctcaaattttgacaaattggaatattagtaaaaatcacttgaagtgtgactgcaggagtcttttggaagattttctgaagggatattctttgcatacaaagacaggaaaataaccttaatcaccacagaccaagaaatggggctgtgataaaacaagtaaattaattcattgtagtaaacattttctttaccaatttttactttcttacccatacatctcttaatgataatcctagaatttatccaggttcagtgacccatttgtcttgtcattccttcaaaaatttattatctttgtctgcaaagtataaaagcatgttgcttaggtcacttaccttatgaagggctaagtttatgaatagctttaataaaagttgaatgtttgtgttctttatcaatccaaccaagctcgctactaaaaatttaaaaggaaatagtaggatttcttttcctcaacactaggtgtttggcaataaaacacaagacccccaaaggctcaacatgaaagcagccccttcctttctgtcttcatgcttcccagtctgtcatctctcctcaagctcccactatctcattctaccattgcatttatcatatgggtttctttatggcttgagagccaagaaagcacatcaatgggtggagtaggcctagggagtgccttccacacagtagacagctgcaggccatgtctctcactattgtagctgaagttttttgttattctgagtcctgtaggacagtcaccctctgctggttactggagggtgttgtagcttgtacctatcaagggataactgagcagaattaaccccgactaacgtcttggagtggggtgtcaatccatagtagattacttgcttatcacgctcaaggcagtgggttccatccctagcaccacaaaatatcgtagcaagaacaacacctaagtgctaggtatttccctttctgcctgtttaagctcttatttataatactggttatgtactaagatttttcaagatctatttttacatctaatttcttcaatgtattcattataattatcaataatttagagaaattataaacttgacattccatagtatgaaattttatgcatttctttggcaaaagttaatgggtacactgaataagaacatttggagtatactaaagatctggctgagacagaaagaaagtttagacttctgggaaaacagcaccacagatactaagtcaaaacaaaacatgaggtaacaaagcaaacataaataagttaaaaattgatattagtgaaataagagtttttatagataagaaagtatcttataaatataatgaagacttcataaaagttatcaagtaattaacttaatatttcaaggcaggttaggacattttttatcttaaatacatacaagatatgatatagagttaaagttacataaattttaaaatagtacatttatcaagcaacttgagctgaggaggatgtggttgagtgagaaaccgtgtgtttattagcaggcaaaagaccctgttttggttttggtggctttgtttttgtttttgttttcatacaatatattctaatccagatttcctatccctcttctagatctactccaccttcctacccatccaactctacgctgttctttttctttaaaaacaaacaagcaaaaagcacggaatagaacaaacaaagaaacaaagaacaagcacgagatgcacatacacacagagatacaagcccacacagaaaacccataaaactccaaaatcagaaaccataagatagaaaagcaaaagaagaaaaaggttaaaaaattgcccagattaaacaatatgagacaaaatgaaacaaaaacttctctaataccaccaagtttattttgagttagccatatattgctgggcataaggcctgtcgttgagtgtattttgtatactcaatgaaattccactgaagaaaactaaatttttacttgtgagctgttgtcaacttgagatggctacttggttcgtgacgggagagcatgtccatttccctatctcagtgctgggaccccatctgacttagacctatgcagaccctgtgcatgctaccacactatgcaccagtaacatttctttggctttttctctctttcaggctcaatcagtggtctaattgttggtaagttctgtgatgggtttattgagaaattctttagtagtatctacttataaaaaatgatatgtaaaaagaagtaaaaaatattttttaagttcaattaaaattaatgtaaatttaggatagcagttttcaacctgtaggccatgacccttgggggctgatggaccctttcacaagggtcacttaaggaaaatagatatttacatatgattcattacagtagcagaattacaattatgaagtagctatgacaataattttatagttggggtcaccacaacatgaggaactatattaaagggccacagcattaggaagtttgagaaccacgggtttagggtgtcatgagattggcatcttcatgcactttgaaggacctcatctttgaattatttgagtgagtaatcaatcatacttcgctgtcaacaattatttattttaatatgactggagagtcaaatctttctttactttttacccagaaatatccatcctgatagtttgtattgttaaagtcataagaccgtcatgtgagtgaatcttgtgtctggagataaaagacttagaggagaaaggaggttttattcttagctaataattccagggtagaggccatcactgtggggagtcaaggtggcaggaatttgaagcagctcctcacatccactgttaagaacttttttccattcttgtacagtccaaggtcccttgcctgagaatgatgccacctacagtgtgtttctatagggccaccttaataaatgtaattaagatctctccctcagacatggccatagtccaaccagagctagctaattcctcactcagattttcttgtcaagtgattctaaactgtgttaagtcgatcatttagccaacacaaatggatttatacagtttgataccaaggggatttctgtcacagagagcatcctgtctcatgcattccactaaagccttgggtaaactgtgtgtactgagcccagcagcaccattgttatgaagggcgatgttgttgggaagaagcttatggaatgttctggtggccccataactaataatgtaggtctaatgtcctagattaaaaccaaaatagagcagaacctaggctaaagttacatggaaaagaatcattgataaccaacagtgggattagctattaagatagagtttaaaaattttgtgatgtgttttcatttattttgttttcctgtttaggaattttcattgggataatcgtctttattttagtcatcattgttttcatttggatgattctgaagtataaaaaacggtgagtaaagccacattctcaaaaaaaaaattgtagcaggaagctgtgaccaatacctgtatcctaacatcctggtggcttagacaggattgccataagtttgaggcttgcctgagtcacagaataatataccgtgcctcaaacaatcaaagcaaaagtagtttggggaaggtggcttagtgattaaaactcttgtacagcaagtatgaggaccaaagtttgaatccccagcacctatttattgccaggtggacatggtggctttcacataattctagtgctcagaaggtagagacagcggatatactggaacacattgattagacagacttgccatgtaagtgtgctctgggttttagtgaccttgtttcagtggaataaggtggtaaacagtagagaaggacttctaacacatacatcacttatatacactctcacacatgcaaatatgcatacagagagagaggagagagagagagagagagagagagagagagagagagagagagagagagagagagagagagagaataaaagaaaaataaaaaactgaatttgtaaattttatgttccttcttttggaaagcaatagaacatacttccataaagacaggtaattctcagaaaggtggccttggttatacaaaatagtatatttacaccaaaggaaatatatatgatagatattttaagtgtgtgtgtggggtgtgtttgtgtgtgtgtggtgtgtatatgtggtttgttgatgcctagcttcttgagttctttatatattttggatattaccgctctattggatatggcattgatgaatttttttccattctgtcagctggcatattgtcttattgacagtgtcttttggcctcacagaagctttacaattttatgaggtctcatttattgtcagtctttattcctgtgctattagtattatatttactcctgtgccagtaagttcaaggctattcctgtctttcttttctgtcagtttccgtgtgtctggcttaatgttgaggtctttgatccactagacttgaactttgtgcagggtaataagtatggatctatttgcaatcttctacatgcagacatctagttagaccaggatcatttgttgaagttgcttccttttttctattttgtatttcaggcttctttatcaaaaatcaggtctgtaggtgtgtggctttatatctgggtcttcaatttgattccactggtcaacatgtctgtttttatgccaataccatgcaatttttattacggtagctctgtagtacagcttaaaatcagggatactgacacctctgaaagtttttttattcttcaggaatgttttagctatcccaggtgttttgtttgtccatatcaaattgaatattgccctttcaattgtgaagggcaattgtgttgtaattttgtaaagaattgtgttgtaattttgatggggattgcattaaatctgtagattgcttttggtgggatggccatttttacattaattttaccgatccgtgaccatgagagatcttttcatgttctgaaatcttcaatttctttcttcaaagactggatatttttgtcatacaagtctttcacttgcttatcttacattgtggatattgtgaagggtgttgtttctctgatttctttcattttatataagagttctactgaattttttttttttggttaatcttgtatcaagccacattgtatcagctgtagatgttccctggtagaattgtgggggttgcttatgtatagtgtcatatcatctgtaaatagtgatacttagacttcttctccttccaagttgtatccccttgatctcttttagttgtataattgctctagctaggacttaaagtactatattgaagagataggaaaagagtggacagccttgtcttgtccctgatttcagtgaaattgctttaagttcctctccatttaatttgatgttggcttttggtttgtggtatattgcctttattgtgtttgggtatgtgccttgtatccctgatttctccaagacttttaatgtgaggggtgttgaattttgtcaaagacttttccagcatctaatgagataatcatgtgggtttcttttcctttcagtttgtttatatggtagattacattgttggattttcgtatggtgacctatccctgcatctctgggatgaggcctatttgatcacagtggatgatcttttcaatatgtttttatattcagtttacaagtattttgttgagtattattgcatctatgttcataggggaaattggtctgtaattctctttttttggtgaatctttgtgtcttttgggtatcaagggtgactgtggtctcataaaatgaatttagcaaagttctttctattttctgttttgtagaataatttgagaaggattggtgttaacttttctttgaaagtctgatagaattatacattaagaccacctggctctgggcttttgcgggggatagggggaggttcaatgactgctatttctttaggggttacagatccatttaatcttgatcttgatctaatcttagtgaggggtatctattgaaaacattatccatttcttttagattttccagttttgtggaataagagtttcctcttatttctcaccaatttttttcatgcagtacttagtgctctgaactttcctcttatttccactttcattgtatcccataactttgggtatgctgtacattcattttcattgaattcgaggaagtctttagtttctttctttatttcattttgacccatcagtcattcggtagagacttgttcagtttccatgagtttgtgggctttctattgtttctgttgttgacatggtagtctaataggatgcagggggttatttcaattttcgtgtatctgttgacgtccattttcttggaaaatctttttctaaccctttactcagaagtaatgtttatctttgatgctgtatttgtcgtatgtaggaaaagattggatcctgtttcacatccattctgttagtatctttttattgggagaatggagttcattgatattgagagacatcaatgaccaatgattgttaattcaccattcttaaccctaataccaactcacagataatccagcatggaagtatttgttatttatgttatataaagtacttgctaagtaactccagaaatcatggtataacattcctggtgaaagcatggggcttatagtcagacctgagttccttgtcggtcaccagctatgaatccttggacaaaacactggccatcaagcgtcatcttccttgcctattgtataatagcccccatcttactgaacacagtcctatacttataatgaatgccagaaaatgtttttttcattagttactgatcttaaaagtaatcaactattttctttttctgtaagttattacatgtagtcatccctcataacctgaaggctcttggctctagaagtctcactgatagcaaaaacctttggatggtcaagaaaccttacatataaagagggtagtacttttatagaacctcctacatgtcttatttatctgtagattagttgtgataatataatataatataatgaaaattctgtgtaaatattttaaactatatagttatactctgtggtttagggaaatggcaagagaaaagcctttatatattcatcagagttacagctttttttggtggttttgacttgtagcttggtgaatgtgtagatgtggagcctgaaggtagagagggagggaggtttctttataacacctgctgctactgtgctaatagtgaggattactttgatacaaagtagaactagtgatcacagagcacaatgatgctatatcaggttgtaatgtaaagctgttagtatgtgaagttgttaaaatttgtggtaaatctatttactaaccaaaagtacttcagaaatagtgagataagttgttgtgaggcttgggtacatgtatataaacaagctagagtcttgatacaatgggtttagtgttttctagtctgagtttttaacttagtaaaattataacttaatatcaaaataaaagttattaattacttttaaaactgtaagatgattcatacagttttcctttcctcactaccaattagcaataccacagatgaaaagtataaagaagtgggtattcatttaaattataaagaagacagctgtgtccgccttcagtctctgctcacaagtcaggagaacagcaggtacatatgcacatcctgaattgaaaatgtttgcatcaactcagatttaaaaatggacagtagagatggctaagaggttaagagcaccgactgctcttccagaggtcctgagttcagttcctagcaaccatatggctcatagccatctataatgagatctggtgcccttttctggcctgcagatatacatgcaggcaaaatgctgtatacacaataaataaatcttaaataacataacaaaacaaaacaacaaaatcccaccccaaaacagattaaaaaacagaaacaattcaaacagaagactgcacacagaagttggaaagtacttctcgagctggaaactttagtttgcttcctgggttattgccatttttatgatttttgtttgataactgttaatactgtgctaaggtatacatgagcctttgggggacagtaggttttgctttttcctgtgaaagccaagtacctgctctctaagggtacacacacatactgatgagggatctcttaagggtcctcggtgactctctctacctctttcccaatttctgtactcacttggcttcctatgactctgactctgtctctctgtctgcctgtctctgtctctcttgtttctctctttctccatttttcaaagcagggttttgctgtgtagcactggctatcctgcaacttactatggagaccaggctgaccttaggctcagagatccacctgtttctgcttcccaagtgctgggattaatggcatgcttcactgccacctaacttcactctttttctgtctttcttttactgcagctatatccatccctaactcatcaatcacctcttctgtgcatcctcaccacaaacccttatatggcaactattggccaaaggtttggggttgaaagagaactaatcctacactgaatgaattatgattatttaactgaatattgtgaatcactgaattataaaccaagtaacagttccaaagatccaactccaatcttgttgcatgagccattttatttgcacatcttcactcagtcattctctctcgggcagcaagggattagtgaaacaggcccagaagcatcatggcccaccaagtcctagatacttacaaatttgccctgttttttggcagttttgactagcaaataagattactccaattttgatagtttcacataacaatagctttgtactgtaatctgacacagcattattgtactctttgatcacaagtaatgttgacaaattctactttatatcaaagaactatgagtgacaacaaaaactgggtagttcccttaagccctgaatttctatcctttccttgctttattcagtaggtgtcctgaagattgctcagttatattgctttgctcaggcacctcacttcagcccttgggcctctcacaaattcacagctctatatttctgtatcacacagagatgttcatttgctcactggcttcctaggaatcctaacataccctgtccctagcgtcttggggcgtctcagaaataatagcgcagccagtacagatctgtcattttcagttatataaggagtttgaggtcagcctgggttatctgagatcctatgtgaacaaacacacccccaacaatacatttctaaggttatttcacaaacactagaaataatcacagctcatgctctgaaaaggagtgtgcagctctcctaataagtggagggaagagcatcacattgtttaataaacttcttctatgtccctctcctttctgataataatatgcgtcacttgaaacttggcattttctgccaatacacagttcaacaatggacagttgaaaagggcctcagtagaaaaatagtaggtacaggaaaggcattttatagtcaatagagatataaatacaggcaactcaatttttttctaacataaaacctgcagtttgttgtattaaatctttaatctcaattgggagtttctaccccacctttgatcatccagttcccagataaaagacacacaacatttatgtttataataagcctttaaagcactagagctgggcagatatctaccctttaagctattattttctacttccctatccataaccctgagttctaatttgccatattccacttgggcagctcttaactccaactggctatgttttcatgtttcacctattccatgtcatcttttcctctctccatcttctcttccctcttgtgggccccttcaaccccacccccccaaacccgtgtcccctatcccctacctttttttctgcctagctatataggctgtaggcatctttattcaaccaatagttttaaatataggagcaaacttacatatcatcactgtgtatacatgcagattatctcatctctgggggcatccaggccttggggaccacaatacatagcaaaagaccaaacctcaacagtagttaatattttcttttcttctgcaatggaagtaaattagcaaagctttctatttattttctagtttcctagttactttttttcttttctcttgaagattattttttttaaatactatatataaaagaaagtgaaatactaattttttaaaaattcagacaaagtaaaataaaatgcagtgctttgggggattttttaaagatctgtatccaaggttcttaggtatagagtttgtttacaccctttactattgggattgttgatcggaaaattgtgcagaacaagtttcaagctaaccatgtaattatattatagggagagaataacagactggaagctaggtttgtttttacaggaagttattttttaaacatcccataaaagtgcttaaaatatcatatatttagatccataaatgcaagattacccacctgagacactttctcatttttctttttgctgaagtaccactagcccagcacggaattcactcactcaagaagtctcctaaatagcagcaacgtgaaatgagaacatgctctgtctgtatcacttttaaaataaactgtttccttttaagatctaggtgtgtggttcatacttataatttcagcacttgggagcggacatggaaggaatgccacagattcagagtcacccaggacatttaacctatctcaaaaataaaaaaataaattaaaaagtaggaactcattctttaaaacagtaaacatatagactactttatatatatattgagccagatgcaatagctgactcctgtaatcctagcacatactctggagaactctgaggcaagagtattactttgattctgagaagaaaaaatcaaaaggtcagtcttgattacagttttccagaacatcagggttaattatttttggcaacactttgtagaaaagggttgagaatctgtactaagcacaagtcctttgtgcccaggctaaatgtcaaagcaatgaagagacaaggtggaggcatatagtgaaggaaagaatgtttgcaggagctgtagatagtgggtgatgctgatcagttgagagagagagagagagagagagagagaggcagagagagaaagaagagaagagaaagaggaagaggaagaggaagagaagagagaacaatgaacagtcaagtaggcaataacatctaggtcaggtagcctctcagggctgtgtccgctggttgaagcacagtattcaggtagaaaggaaaggctccagccttgtcagagataaactctggtacccggtcctgaatatgccacccttgcttatccttcatggtaggaacaggagaaggatgtgcttttcagagctggctcttctctagagaacctactagtcactgtttacacctctgccacaagtccacatctaaagagtcttagagaaatgctttgtgcattatgggtgaactgctttctatttacaaattaataaaaggaaaaaatataaggtgtatcattaatcttttgtttttattggatattttctttatttatatttcaaatgttatcccctttcctagtttcccctccgaaaatactctatcccctcctccctccccctgctcaccaacccgcccactccggcttcctggccctggcattcccctatactggggcatagaagcttcacaggatcaaggacttctcctcccattgatgatcaactaagccattctctgctacatatgcagctagagccatgagttccaccatgtgttttctttggttggtggtgtaatcccagggagctctggtggtactggttagttcatattgttgttcctcctatggggctgcaaaccccttcagctccttgggtactttctctagctccttcattggggaccctgtactctgtcgaatggatgactgtgagcatccacttctgtatttgttaggcactggcagagcctctcaggagacagctatatcaggttcctgccagctagctcttgttggcatccacaatagtgtttggttttggtggttgtttaatgggatggagccccaggtggggcagtctctggatgatcatcccttcagtctctgctctgaactttgtctctggaaatccttccatgggtattttttctcccttctaagaaggatcgaagtatccacactttggtcttccttcttcatgagtttcatgtattttgcaaattgtatcttggatactctgagcttctgggcaaatatccacttatcagtgagtacatatcatgtatgttcttttgtgattgggttacctgacttaggatgatatcttccagatccatccatttgtctaacaatttcataaattcattgtttttaacagctgcatagtactccattgtgtaaatgtaccacattttctgtatttattcctctgttgaagggcatctgggttctctccagcttttggctattataaataaggctgctatgaacatagtggagtatgagttcttactacctgttggagcatcttctggatatatgcccaggagtggtattgctagatcttctggtagtactatgcccaattttctgaggaactgccaaactgatttccagagtggttttaccagcttgcaatcccaccaacaatggaggagtgttcttctttctccacatcctcgccagcatctgctgtcacctgagtttttgatcttagccattctgactggtgtgaggtggaatctcagggttgttttgatttgcatttccctgatgattaaggatgttgaacattttttttcggtgcttctcaaccattcagtattcctcagttgagaattctttgtttagctctgtaccccatttttaatagggttatttggtttcctggagtctaacttcttgagttctttgtatatattagatattagccctctatcggatttaggattggtaaagatcttttcccagcctgttggttgcattttgtcctagtacacttcttccttttcatcatactttcttctgccctgtataaaaaccacaacaaagggtaataaacactttttatgaatctgcatttatattaataccaccatcctgattatgtaagagtctgaaaattagtgaggaagatcccagactcagatagtatgcaaagacaaagtgtttttttctgcagaatcaaccagcatgaggggggttcagccattcttccaaatggcaaccctagacaaaggcattctggcctaatcctagagttcctggaactctagaaggattaggtaatctctaatgtgattggcaggggccaaagtggtgacattggtataactttgattggctactatattgagagagtgagttaggtaatctaaaatttcattgatgggtgctgggaggccacagggattggcttctgattggcttttgccaggtggtaagtggtctgcattcctgtgtcttgaatgtttagccacaggatgagataaggccggccagcactataggcccatccggagataagatattttctagttcttctggttatctctaggctattgggagggggtttacgaccttcttcctggaatttttgatctgttccggaagctggtgacctatggcctagtccctgggatttatggtctgttcctggagctggtaacctatggcctagtccctgggactggtggctgtctttttaaaattaggcctggtcctaaaatggagacaaatggagtttatgttgtcctttcaattattagcgtatgaattcttcacagtttaggtattcccaatgctgtcgtaagtgaaaatatcctgttattttaaatgtcccttcttgacaaaacaaacaaatagcaaacaaacaaacaaaaaaactgcaatattatggataaagttagtgtagaagccaattcatttcaacagaatgagatctgagattcaagtctttgatattacttcaaagaaatgcaaaagactttggggatgaaacttctgtcacttccatgtacccataccctatgttgaaatcacatattatctagttagacagagtgaacagaaaactggatgacttgaagaaaggagatatagtctaggagttatgctttataagtctattgttttcctttttattttaaagtgttcataatatggaataagatcattaaagaacattaggaggatgtaaaaacatacaaacaagtaaattcttctatgtagcctagtcactacttactaggctgtttcatatatgtctctacacatgcatatttttctcaaattgttcctacatttctaaaacagagcacactttcaaaacagattgaagaaaaacatgtaataacatttatcaccttttctagggaatagaggtaacttttgtttacttagaaataaatttttaaaaaatgtaaatggtgataggaagagttactaagagtattcaagaaaactatctgaaaaaaaacaaaacactaaactaaactctgggtttcttctactttaaaagttctttgtaccatgctcaatattttaaaaaatgaaataaaagaactgtcaaaaaaaaccttacctttgaataaattcagaatacttttttttcttttccaatttttattaggtatttagctcatttacatttccaatgctataccaaaagtcccccatagccacccacccccactcccctatccacccactcccccttttnnnnnnnnnnnnnnnnnnnnccactccccctttttggccctggcgttcccctgtactggggcatataaagtttgcatgtccaatgggcctctctttccagtgatggccaactaggccatcttttgatacatatgcagctagagtcaagagctccagggtactggttagttcatattgttgttccacctatagggttgcagatccctttagctccttgggtactttctctagctcctccattgggagccctgtgatccatccattagctgactgtgagcatccacttctgtgtttgctaggccccggcatagtctcacaagagacagctacatctgggtcctttcgataaaatcttgctagtgtatgcaatggtgtcaacgtttggatgctgattatggggtggatccctggatatggcagtctctacatggtcaatccttttatctcagctccaaactttgtctacatagtgcctcatagatatttataaattatatgttattcttttaaaaacatgactagttaacacttgttagggaggcagcttagcacttaaagcccttacacacaaccaaaaggaaatgagttcagattcccagaatccctcctgtaactcaagcctcagaaggctgagaaatatcatttcttgagcaacctggctattgaaactctctgtatcagtaagctttgaatttgattgagagaccttgtagtttgaatatgcttgacccaggtagtgacactatttgggggtgtgaccttgtggacataggtgtagccttgttggagtaagtgtgttactgtgggtgtgggcattaagaccctcatcctagctacccggaagtcagccttctcctgtttgccttcagaacaagattttaaactctcatctcctcctccgccatgtctgcctggacactgccatgcttctgccttgatcataatggactgaacctctgaacctgtaagccaaccccaattaaatgcttctcttataagagttgtcttggtcatggtgtctgttcacagcaataaaaccctaactaagacagaagttggtatcaggagtgagtattgtcatgataggcttgaccatccttttctttggaagaatgtagatttggggactttggatttggaaagctttggaatgctttaagtggaacttaatgggctattctagtagaaatatggaagactttggtgctgagggtgatttgcactgttgaaactctagaggtttcagaggagaagaatttcagtatgtggccaagagactgctactgtaaaattttgaagaagaatgtgtctgctttttgccattgtccaaatagtctgcctgaggctaaagtgaagagatttagattaattgctttgacaaaggaagtctcaaaacagcctggtataaattccattgtgtgattactaaagttcactcctatgaagaggcttttgatgaagcacagcaagctctaaaaggaaaagtacaaagtgtacagtaataaaggggcaccaggaagtgaaatggagctgaatgctatgcttaagaaggagtggtgactttggggcaagatcccacccagcgaaggtaggtccaaacatgatggtaatacatcttaatccaaagagacagaaggaagcagatctttgagttcaaggctagcctggtatagagaaagtttcaagtagagaaaagcttcagtccaggcatggtggtacacacctttgaccctaggattcaggagacaaagccttttagatctgtgcaaggtcagtctaccaagcaagttccagaacagccaagcttaggccatgaaggagttagaaaacagaaagctggtgataatttaataaaacaagttcaagctcaagcaagcatcagaacttggcagcttcagccatgtggctctggctttagagtcaaaattagaaggggctactaagacaattgatgctggttagctggagctaagaacttagtggtgattaagaagagaccagtgactgaagtgaaatcttggaagccttttgtgagagcacaaagaatctgtgttccagagatagccagagttgtacccggtgctgcagctgaacttgtagtgtgtaagaaccacccaggtagtactggttttgaatgtatgaagcagtcatggacagcagctgaggcttggcactgtgagaggctagggaaggcctggtactgaaggtgtcattcaaagaagttgaggcttggcaccatgaagagagcctatgagaggttattgatgaatcctacttgcagcaggaaagcccagcatattggagatgccagtaccatgggatgaccaccaaaaaaaaaaaaaacccacagcagcagcaatggattggagtcaaccagagcctagagtgctatagagggcagagctggagaagtgttgcaagccctttggaggatcatgtgtggattccagacactggaataagaagctgaaacattgaagttgccttggagacccaaagatgttcaagatgccagagctgtaggatatctgctgagaactgctaacagagtggaaccagcccaggagaaagaaatttgttgcagtcaacaaagatgaaaaaggagttagagatctgaagacctctttgacatcagatatggagatgcagagtttagagtttgcccagctggcttactgtcttgctttggggattacagttaagtgattgaatgaatctcagaaaatactttgtactttgtacttttaacattgttgagactgctatagactatggggactttggaagttggactaaatgtattttttattatgctgtggctagatatggcccccatagactcatatgttttaacaagcctatgggggccagggagtggaatgtggtggttttaatatgctggcctagggagtggcactatttggaggtgtggcctatttggagcaggtggctcactgtgggtgtgggctttaagacccttatcatggatgcctggaagccggtcttctgtgctgttggaacaagattttaaacccagctcctcctttaccatgcctgccttgacactgccatgctcctaccttggtgacaatgggctgaacctctgcacctataagccagctccaattaaatgtttttcttataaatgtgccttgattgtggtgtctgttcacagcagtaaaaccctaagacagaccttacctctgaagatgacgtgggggagtaattgaatgagattcctggggctggagatatgattaagagcacttgttgttcttgcataggacctagggtttagttcttgacacccacatggtggctctgctcacaaccatctgtaactccagtttcaggaaatccaacaccctcatctgtcctgtgaaggcactgcatacacatgatatatagtcatatattcagtcaaaatactcacagaataaaaataaagacatctttttttgaaaaattaatttattttttacactcaatattccattctctgccccctatgcaccctccgactgctccacatcccacacctcccccagccccgtcgccacataaatgccacccccccccaccccacctgacctctatactccctagggcctccagtctctttttttttttttccatttttattaggtatttaactcatttacatatccaatgctataccaaaagtcccccatatccacccacccccactcccctgcccacccactccccctttttggccctggtattcccctgtactggggcatataaagtttgcaagtccaatgggcctctctttccagtgatggccgactaggccatcttttgatatatatgcagctagagacatgagctccaaggggtactggttagttcataatgttgttccacctatagggttgcagatccctttagctccttggctactttctctagctcctccattgggagccctatgatccatccattagctgactgtgagcatccacttctgtgtttgctgggccccggcatagtctcactgggcctccagtctcttgagggttaggtgcatcatctctgaatgaacacagacctggaagtcctccactgtatgtgtattgagggcctcatatcagctggtgcatgctgtctgtttggtggtccagtgtttgagagatctcaggggtccagattaattgagactgctggtcctcctacaggatcaaccacaagcctcaaaagtacataaatggacatacacacaaagaggtatgcatagatgtatgtatgaacgaacaaatatgcatgcatattacacatatacgtatgtaaaattaaaacaagtgttcctgtatattatatgtatatagtaatattttgagctatgctcatgatctcaataaatgtcagaatctttctggatattgaacaaaaggtatgcacatcatttttgcttgtttctgtgttttaatagcttctttaaaggtgtgttatataataattggtttgacactgccctggttagttttatgtcagtttgacataagatagagtccctggagatgagggagcctcaattgagaaaatacctcaataagattgggttgtaagcatgcctttagggcattttcataattagatattgatgtgggtgttgggggtcagctattcttttggggccacctccaggcagataatgctgggttctataggaaagcaggctgagcaagccatgaggaacaagccaataagcagtgttcctccatggcctctgcatcagctgctgtttccaggttcctgcactgcttgagttttggtcctgacttcctttgatagtgatgtagaagtgtaagccaaataaacccttccctccccaacttgcttcttgatcatagtattctgccctggcaatagaaaccctaagacagacaccataaggatgagctagctatcaacttgattttagattatgaaagttaggggaagaaaaagtcctatgcaaagtccactaaccaccaccaccaccacacacacaaaaaatggaactttagcacaaaaagatattagaggattcttgaaagtttgtaatatagtatatttaccctttacatgtctcttgcataagcatgaggacttgcattcagattcctagaacccacataaaaagtccaaaaatgactgaaagccaagagatggaaaagcagagacaggaagattcctggggtttgctggctcaataaactttatgttcagtctgcctgaacctaaagtaataataaataaataagttggagagtgtggtagtttaaattaaaatggcccccataaacgcataggaagtggcactattaggaggtatggccttgttggagtagttgtggctttattaaaagaagtgagtcacaagggtgggctttgaggtcttagtttaagccaggcttagtgactcacagtctcttttgcctgaggatccagatgcagaactgttagctccttttccctgcatatcatatgcttcccatcatgatgataatggactaaatgtctgaactgtaagccaactccagttaagtattttcctttataagagttgtcatggtcatgatatctcttaacagcaataaaaccctaactaagacagagattgaccaaggaagacaacatgtgttaacccctggcctctacaaccacatgcacactcatgcatgcacacttacgtgcatgcacaggtgcacacacccaaatggacatgtacattcacaacatactatgagtacaaaaacacaaagacagatgtaaaaccaaaaatggataaagtaagtgtccttgtgaaaaccgtccttgtttctgtacttggttttgttttttgttttgttttgtttacctgaattcctggagatga

SEQ ID NO: 1311 - DNA, 1649 bp, Mus musculus
gccttgttttctttggagtcgaaggttcctgcaagtggaaaacttcctggagctgacctactaggtattgaaccagtttctgcattgctgaatcaatctcccaagggtaattccacagaaatcccaggggcttggagtaaacaagaccgcgcctagcccagctagaggaagttttattccggaacccagcgccatttctgggtgggactgctttctacaccatttgccgtaaaacgttgtttgagaacggtgtgaggggaatggaggtctcttctcggagttcagagcctctggatccggtgtggctccttgtagccttcggccggggaggagtcaagctagaagttttgctgctgttcttgctgccatttactttgggtcactgcccagccccatcacagcttccttctgccaaacctataaatctaactgatgaatccatgtttcccattggaacatatttgttgtatgaatgtctcccaggatatatcaagaggcagttctctatcacctgcaaacaagactcaacctggacgagtgctgaagataagtgtatacgaaaacaatgtaaaactccttcagatcctgagaatggcttggtacatgtacacacaggcattcagtttggatcccgtattaattatacttgtaatcaaggataccgcctcattggttcctcctctgctgtatgtgtcatcactgatcaaagtgttgattgggatactgaggcacctatttgtgagtggattccttgtgagatacccccaggcattcccaatggagatttcttcagttcaaccagagaagactttcattatggaatggtggttacctaccgctgcaacactgatgcgagagggaaggcgctctttaacctggtgggtgagccctccttatactgtaccagcaacgatggtgaaattggagtctggagcggccctcctcctcagtgcattgaactcaacaaatgtactcctcctccctatgttgaaaatgcagtcatgctgtctgagaacagaagcttgttttccttaagggatattgtggagtttagatgtcaccctggctttatcatgaaaggagccagcagtgtgcattgtcagtccctaaacaaatgggagccagagttaccaagctgcttcaagggagtgatatgtcgtctccctcaggagatgagtggattccagaaggggttgggaatgaaaaaagaatattattatggagagaatgtaaccttggaatgtgaggatgggtatactctagaaggcagttctcaaagccagtgccagtctgatggcagctggaatcctcttctggccaaatgtgtatctcgctcaatcagtggtctaattgttggaattttcattgggataatcgtctttattttagtcatcattgttttcatttggatgattctgaagtataaaaaacgcaataccacagatgaaaagtataaagaagtgggtattcatttaaattataaagaagacagctgtgtccgccttcagtctctgctcacaagtcaggagaacagcagtaccactagcccagcacggaattcactcactcaagaagtctcctaaatagcagcaacgtgaaatgagaacatgctctgtctgtatcacttttaaaataaactgtttcctttt

SEQ ID NO: 1312 - protein, 436 aa, Mus musculus
MEVSSRSSEPLDPVWLLVAFGRGGVKLEVLLLFLLPFTLGHCPAPSQLPSAKPINLTDESMFPIGTYLLYECLPGYIKRQFSITCKQDSTWTSAEDKCIRKQCKTPSDPENGLVHVHTGIQFGSRINYTCNQGYRLIGSSSAVCVITDQSVDWDTEAPICEWIPCEIPPGIPNGDFFSSTREDFHYGMVVYCNTDRKALFNLVGEPSLYCTSNDGEIGVWSGPPPQCIELNKCTPPPYVENAVMLSENRSLFSLRDIVEFRCHPGFIMKGASSVHCQSLNKWEPELPSCFKGVICRLPQEMSGFQKGLGMKKEYYYGENVTLECEDGYTLEGSSQSQCQSDGSWNPLLAKCVSRSISGLIVGIFIGIIVFILVIIVFIWMILKYKKRNTTDEKYKEVGIHLNYKEDSCVRLQSLLTSQENSSTTSPARNSLTQEVS

SEQ ID NO: 1313 - DNA, 342748 bp, Homo sapiens
  misc_feature (1)...(342748): n = A,T,C or G
tgaagccaaagatatttgtttaaatgaagatttggataaactccaaggtaaacaaaagggctattaagaaaaggtagggaattctggaaggagtgtgaaaggacaccctcttccactacttactggcccctcactgttcttcagtatcacggccacctctggaggcagacataggatgacccgatgacagcaatccatctctgttcccaaagggtattctgcatcccttaaaactgtgaggggtcaagcctttgtttcagtacctcataaacacaaaatctgaaataagtaaaatacagtaaaatatgatatgcaaatccatgagttttgcaggaagacaggtccaaatggcaggaaaatctctttctgctttgactggaaggaatgaaaacagaaatggtgatgaaatgcctgcaaagcattaggcagtttggaaagtccctgcaaatgtccctgtcccccatcctccagaccaccccacaccattatcacgactagcaacatgaccaggtcacacagatgtttgaccatttttgtggactgctcattgattagcattatgtgacagaagtattccgaggcagcttactgcttactgtagaaggtgctggttttcagcgaagatagtcaagtggtttggaaggggaaagaattatcttagccggaatctagacactgattctactcattctgatactacattaattctgctttgcaaaggggaaagaatattccttcttatttgactcctaaatgaacttctttcactattttgagggcccaacatcccacacaccccaggccagtgcggaaaccccctaaaggaagcagttcctcttctttttggataactggccagatttttttccaggaaatctctaggattcattttgtttttttacatatgacttttatgttgtattcaagatacccaaactctaagtaatgtaagtttattagattgcaaaacattgcaactgttttaaaactccatattagtgtcatgacaggaaaccgtaactgatttttaaaatacttgaattgggaaaaattaagtctcatggagagtgattctcttctcttgcatccacctgcatggtctctaccatgcccctacacttgctatgtgttcttggcaataccccaggaggttcagacaatagctcatcaacactgagaaccacaacttgcagatgtggtagccccatttacacaatggcaattgctttgtgctggagcaaggatctcatccacaacctatggtctaagggtaacttgtgcataaatagaattctgctgtaaggcaggaggactagagatggtttagaatggcttgatatcaatctcctttataattcagcagaagctaggaagttccaaagctgatcatggaaacagatactatcttaggataaatcatagattgggaaacattttgctaaggacttctggttggtgcattctggttgctgttgacagcaaacataccctctcttcttgatctatctgcagtaatggccccttatacctttctaatattcatcattacttttatttttgtccctctgtttattcttgatcattctcactggtcatttgacaaattaattagattttttaagaacccaacttggctcctgtttttgatgtcactgattttttgttttaattttactatctcctttcttcggatttttttttctgacctcttaagacaatatatctaatatctctttctaaaacccgcattagctgtatcccataaattttaatgtttttttctcctatggctcagtttgaaaaacacactaatatatgttcgtttctattatgatttttttctgccctatgtataagttagacatgtctatcttaattttcaaacatacagtttttaaaaagtatttattgattattaatttctagctcaatggcgtagagatcagagaacatattccacatgatttcaatctttgaagtttttcgagacttgccctatgatctagcttgcaatcaatttttgtacattagctttctgtatctgaaaaaggatgtcttctgcatttatcaggcgcagtgttctataagttccctatgccttgcaagttaatcatgtataaattttcaatttatttgctaattttatcaacttattctatcaattatcaacagataaaatgtatctgtgaatttaaatttgcattgtaaatttgtctgtttcttcttgtagttctgttgaatttgtcttaaatgttttgaagatacactattatatgtagaaaaacttaaaattattatatcatctaagtgaactgttcttaaattttcttttgtcaacaattgatataattacatatatcttttactactgtttacataacatatctttttccattactgattttcaagttttctttatctttagggttttttaaatacagttttattaaaccataattcatataccatgcaattcatccatttaaagtatgcaattcaatgacttttagtatatttacaaatacatttagtcattactagagtccattttagaacattttcatcacctgaagaatactcttttagtgtcatcctctatccactccctattatccatcctccctttatactcccctccgctgctaagcaatcactgatctatttcctgtctctatagattttcctgttgcagactttcacgtgaatggaatcatataatgtgtggacttttgttattggcttcctccagttagcataatgttttcatgcctcatccaagttgtaacatatcagtacatcattccatcttatggttttttccgttatatggatgtacacactttgtttatccatcaatccgttgattgacatttgagtcatctctaccttttgactgttatgaataatgctgctatgaacattcatgtacaagtttttgtgtgaacatatgctttcatttctattgggtatttacctaggagaggaattgctgggtttaatcatttgagaaactaccagattgctttccaaagtacctgcaccatttgatattcctgccagcagtgtacaagggttccagtttcactacatcctcatcagcactttttattatctgattgtttaatttcagccatcctggtgagctttgatttctgtttctagtggcccgaaattctacaagaatcaaagctcaaattctcccacacccctaaaatgacctagtagatttccactttctcttttatgttgccctaataatttctcttatacattctgattatatatatttatagggatatctagatagatgatagatagatagatatatagatagataggcaggatggatggacagataggatagatagatcgatctaaacacacacacacacacacacatacacacacacacacacacacacgtatttcagcacttagggttgttttcagtggaataattcatccagttaacctaggacataacattactgaaaatagaattccattcttttacccattttaattggtatatcgttcctatgggtatgtagcagttcttcacatgttctacataacagtctcctttttagttatatgtattgcagatgacttatgtcttatgtaagtcatgtggttgtgctcttgtaataatatattttaacaaatgaagtttttagtgttaatatacttgaatccatcaaacttttcctttatcatttgcattttcatgtctattataagaaatatttccttaccccaaggtcataaaagtactctcatatataggttcttctacattttttaatgtcttacctttcatgtttaagccatcatccattgggaatagaattaatatgtatgaggtttggattgattttattattccattatatgtaatgaattgtccccaaattatttgttgaatagtctctctcatctttcaccagcaatcttcagcactacccatgccatgaagctactttctatatatgaggtctttctcttttttcttattaatctatttttctactcattcatcaataccacactatcctaaatattaagaatttaggtcttgatacctactagaacaagtatcaggaagtgtcacttttactgtttgtgtccctttgctatgatgtattttagaacgacattgtcaggttcctttaaaaatgttaaattttgacaaaaattgcattgactatacatttgatcagtttgtagagagctcatatattttttaatcaagttgtcctgtacatgaatgtgcttatttcttgatttatttaggtcacattcactttacctgaataaaatgttataattttctccataaagattcttcaactattctgttagatttattcctattacgcacttttagtaagcatcctcttcttaagatttaaaatgagctcagtttaaaacaaaatgcttctaatattttaccataaggaaagatatttgctgcaggtattttttgcaaatatctttatagggctaagggaactcttttctatttctctgtagtttaaagggcttttaaaaatcggttaaattttattaaatcttttttttttttttttttttgagatgcagtcttgctctgtcgcccaggctggagtgcagtggtgcaatctcggctcactgcaagctccgcctcccggcttcacgccattctcctgcctcagcctcccaagtagctgggactacaggagcccgccaccatgcccggctaattttttgtatttttagtagagatggtatttcaccgtgttatcctggatggtctcgatctcctgacctcatgatccgcccgcctgggcctcccaaagtgctgggattacagccgtgagccactgcacccggccaaatcttttatgagtttatgtttgtggtagattttaatctgttgaaaactatctttgtaatcctagcactttgaggacatggcaggaggattgcttgaggccaggagtttgagaccagcctgggcaacaagggaaaccctgtctctacagaaatctttaaaaatagccatgcatggtggcatgtgcctgtagtcccagctactgtggtgaggcaagaggatcacttgagcccaggagttcgaggctgcagtgagctatgatagtgatactgcactccagcctgggcaacacagcaagatactgtctctaacaaaacaatacaaaaaaactgaaggatggttcctctgaagaagaatgtgtttccttcagttagaagccagaggaccacaacagcactcggcttaattcaagtatcttaagtcaaattgcctaccttgtgcaactccctgcatataaagcttagtcaattgtagtaaaaattaacacaggacaacctcctttgtgtacacctacaaatcactgctccaattttagttccatttacctttttttcaaaattgtccccattggcaccaacatgtatgtactctggattttgtttattataaacaactacaaaatccttttgatgtatgtctaatgtcttaagcatattacaggatgaaaactctgtgcagaatccccattttctcatgagatttgtgtatttattcattcaaaaaatttctatgaagtgtctaccatggatcaggcaatattcatggaactagggggctcgaacatagagaaacagacagacaaaaaaacaaaatatttccttcatggatcttacattgtaagagagacaaacacaaatgaggtcattgtaaaatatataatgtgttcaatggagctaagtagtaagagaagaaaaatagaccaaagaaggggatatgaatggaaagggaggtaaaagtgtaagaggatatctaggaaagatctcactgagaaggtatcttcgagtaaagactagaatgaaatgagggagctggccactggggctattcaggagaaaaacaatctggacagagcaaacaagaccctccgagggcaaaggaccccagtcagagtgcaaagaatactagagcagcaaaggccattgtggccagagggagaaaagaaggagaaaagggtcaaagatgaactcagagaagttaaaggaaagcagatcacattggactgaatggatcatagttatgacattgccttctactttgaatgagataggaaattattggagggtttggagcagaaggcagtgatttcttttttcctgacaaacatgtaaacaggatcactgcaagatactagacaccaacacactcatctacagaggagttaagtttttgtgttgctgagaagtgtttattaataaaaatatatttgggaaatttatgagggcagacaagaataagcatgaaaagaatcatgaatctaactgtaaaataaatgaaacaatacacgtgcaagaagaaaacatggatgaattattgtgtaacctggagaatggtttttaaaaccatggctcctaatccagatgcaataaaagaaaagatttatcaacttgactgcattaaaacagacaatgcttacaaggcaaaacgatgccataaacaaagtcaaaagacaactgacaaactgggaggaaacatttgcaaaacacatccagaataacaatcctaatatatataaataagtctcaaacattgagagaggaaaaggcaaatatacatgataaaaatatattttataaatgttcagcgttactcatagggaatgcaaattaaagctacactgagataaaatgtctcatttattagactgactaaaatttaaaaccatgatgacagcacattagattaatgaggtgctctcacacagttttgtaggaatatatgtggtacaactcttattaaggaaatttggcaatatctaacaaacctacatatgtgtttaccatttgacccagcaatcccacttctaggaatttgaactgaagacatgcttctaacagcagaaaaataaatattcacaaagttactctttagagcattaaaaacaaccaaactgtccatacatagggagatggttgaataaactatggcatatccacacagtgaagtattgcatgcaactgtaaaaatgaatgaggaatatttgaatttgtaggaaatagtggattccagcatatttgttaagttaaaaaagaaatgtgcaaaagaatacctatagcatgcttttaaaatgtaataaaaaaggagaactaagaagacaaatgtgtagcagctcatttgagcaaaactaaggacaaaccagaaactactgaaattgagtacctatggtggagaggatagaggtgatggagagaagtgacatttcccttttattgtgtctttttatatcaatctgacatttgggactatgttaatgttttatttaagcaaaaaaaaaatcaaaaagattgaggggaaactaaaatagaatacaaagagaaacaaattaacagtattttgaatgaataacaatcacactgaagagggggaataatctgagtaactttggaacacaacaatgctgtttttatattttcgggctataaacaaaataaaactttaaaaacgagtagatttgatttccatcatagtatagaaatagcaattttaaacttctttctgtgtattctaggattaagcaaataagtaaatatattgtggatctaggtgtctcactgttgaagaagggagttacacatgcagaaagagggaaggacagaatgaactctatgctaacggactgaaattggaagaatcactgtgaattcatgacatatataaatatagatatgggaatggatatacatatatatatataatacatatccttgctctgtctgctgagagggtgcggaaacaatgatactccaataaaaatgaacacacttagcatccaattctggcatctaaatgccattctctgccagaaagaaccagcattccttggagaaacagcaaattccagtgtcaggtctagaggtgagtctggagcatttttttttgtgtgtgtgccagaaagtaaggaagtgctcaaagaacaataagaacaagtcaaaatgacataggaactattttgagggctcccactggcccgatcagggagaatttaagcatcaaaataaataatggtagccatgaattatgacccattgagtaaataaataaaattcatattgatatagtttatgctgatatagataaatgaataaataaatagagaagggaaaacttttatttacagtaaaatgccaacagatgaatatagaagtaattattaaattaggaaaaaacaccctttgacaaccatcatagtaaaaattgattcaagaaaggatcatcaatagacgctaaaatttgtgggtaaaaatttgatgaaaaaatgaggaatttacatagttttaaagtatctccctataaaatacttattaattacaaagggaaaaatactgagtctacactaagaaacatggcaggcaccatcttaactaagtgatcaaagttaccaccaccagtaataggacaaatagacaacatatgcctccccgtaaggataagacatcctttctggtattcctgtcaaataattagattcaataacctgaatctatcatgaagaaatgatagacaaatccaaattgtggggtgtgatcctgtctcctgacattaccatccacgtatactgccctcctacactgaaaagggctgatctgtacaatcaattggatattctggagttaacatattgtgatttctgaggacaggtcacaaaggacattatggcttcttctttcttgttctcagagacgctagctggcatgtcacgaggacactcaacacacaagcagcgagccctatggcaaaatccacgtggtgaagaatgaagcttccagccaaaggctggtaagtgagccatcttagatgtggattcgcctatcccagttaacccttcagatgactgcacctccagctggtgtcttaactgcaatctcctgagcgatcccaagccagaaccacctgaccgacccacagaaactgtgagatcataaatgtttattcttgctttacaccactaccttcagggtaatttgttattataatagataacggacttaaaagtcattctccaaaaataattgtggtgtattcgtcaaaaatgtaaaggtcatgcaataccaaaaatgctgaggacatttttccagaataaagaactgggggtggggggaaggcataatgatcaaacacaatacatgatcctgaaatgattctggaccaggaaaaacaaaggttggtttctattgttgttattgtttttaccataacacaggttattgagatgattgtcaaaatttaaatacagatggtagcttatagtcttgtgtcaatgttaagttcttatttttgatcattgcactctagttatggaacagaaagtccttagtgaaccatttagaataggaataaatgctagatggttccaaagtaataattatataattataattatataatcacatatatgtacatatatgtctatagagaaagaatagagaatggtaaagaaaatacagcaaaatgttaacatgcagagaatctgggtgacaagtatatgggaattctctgcagtactcttgaaacttttctgtagagattacttcaaaataaagaacagagcagaagtggctgctgttcctaaattccctaagtaaacttacactgctttttcaaactgggagatgaatccactaataggttttgaaatgagtttggtggatttctaataagaataggatagcctagcctagtctagcataacacagcatggcacagaggacgaacattgtagattactaagggtgagtactaacttgtgaaagttttgtttaagttctagtaagagaaacaagtgagtgtagtgggttgcgtggtcaaaaaagtggggaagccaccgcaacgaggggtgagtctgagccaaagagtggctcagagctccccgcccacctcgtgccgggccgtccctcccgcttgtcccaccctcaccggcgccgcgtcagcccccaggccgcctgcaggtgtgcgctcagaactagcacgtgtgccggacactatttaagggcccgcctctcctggctcacagctgcttgctgctccagccttgccctcccagagctgccggacgctcgcgggtctcggaacgcatcccgccgcgggggcttcggccgtggcatgggcgccgcgggcctgctcggggttttcttggctctcgtcgcaccgggggtcctcggtgagctgggagggggagcacggaggtggggacgcgtcccgggcagggaaagtttctgtgccgcgatgcaaagcagggggccaaaagcgagacggtgggggcagtgctcgacgcgtgtccgcctcccgctagctttgagggaccactgcaataaaccgcctggtcctgattgtccccactggcccctccgggagctgggacctccagaattggaggctgcgccacagaggggcgctgtctggtcggcccggtgtggctggcggcgtgcgggtgctcgcggtctcctgccgggctccccgcccccaggattctgcaggtgctcatcgctctctggccggcggtcagcgctaccgctcgccacgggaaacctacccactgcatgaggcaccagctagccacgtgaggctgtttctgtacacccgaaccgcgctcttgcccagcaaaagcggcagaacctcggctcccttccctaaataagagtaagacctggttcccaagcatgggtctcagattttctgaactctaatgtgatattggtagagatcctaaacattaaccatccgtagttatttttgagacatggattaaaactattgttttcttcttgttattaacctactgtaatggtgtggacgtccgcaaaggtctcattcaccgtttattatatctttttttcctccagattggcttgattttaaagaaagattataattaagattagcgtctcttggctacaggatgggtctaagtttctaattatctccacggtaccgtgcattcctagtttataagacgtttactgtgtgcagacctcaataactgggtgacttttggcaagtcatttagctccctgatcttcagtttcttcatctgtaaaatgaaactagtgattaactggccttccacctcactgagctgccctgagcacagatgaaactaagcaaagaaagttggatgttagtcgttactactaaatatcagtaataagcctcctgtacagacttgattttatggagccagcatttaagctaacaagctgggtgtccaattgtttctatggacatccagcttattgaggtgtctggaatacagcacatattagtttattacaactttttgctttcctgacattttactgtctcctgacccttaaacctttctccagaccattatcttcatctcttttctttttctgcatattaactccctttgaacaaatgtatattcacactttttctaagagcagagtacgtccctgacttctcacctatttctaaatttcaaagaggatattatcaactgaaaatcaaattcttcaccagtcctgccaattcagggccacagcagcagcatcatgtaggtcacttaactggagccccatgaaataccaggtctacctatcagccattcaagctactgtgcttctgttgtttgtccatttctcatttttgtaccagtattcccatcctaagcattataattacctgtgtaacaacctcatctcttttaagagattttggttcttatgattggaaaggttaaagagtgacctataggtcactttccaattatgaaaacaaaaaattaagaaatacatatattttcattatttcactccattgttcaaaaatctaaaaggcctccagtggaagaaaatctggtgtcttcagcctttctagccctttggaatggaatctcaccgaagctcacaccccctgatttctccagctgcctgtcttgtatgcgctgctcatggtcttccccacctgtctcccatggctcatgctttgcccactctccactgctaacttttactgctactgcatgctctccacacatcatctcttggccagttcctgcacttgagtgtgcttaataaactactaaagtacctttataaaatgtaggttcctggttccacctccccctccagaggttcataggtttggagttagcacaggaaagctgaggtttaacaatcactctagaagattctgcaacaagtatctatagggcacactgctataagcaaagtcaatggaagcaaatttcctttttagtgttttcctatttttccttttgtctatttgcataaacagtttcaaatttcctacacttctagattttactcaagccttcagtggccacctaactttatcctatgctgagaaaacaaaaccatgaaacaagaatgctcccattttctaatcagctacaaacctaccaacttacaaacttacctccatctagaatcagattttgttctccactgcagaaaacctgctgaggccttcccgtcacattagaataaaacccataccccttattctccagtctgaggccttctgcctctccctgaaattctctgtaccccactcactctctctgccccagccacactggccttctctttattctttgagcacaattgcactaggtattctctcttttgaaatgctcttcctacaaattattctttgcctgtctccttgacattcaaggctcagccctctgttgtgcttctctgactcttgtctgaagtatccatattccagggtactctccaatacaaaactgtgttctattttctacagaccacctatcaccatctaaaaccttcttgcttatttatgtacctgtttgttgtttgttccctcactggaatacaagttccatgagtgcaagaccttaatctgccttatttcctgatttgagttcctatcaatagcctgtaatttggaattcaataaatatgaattgaaatcttggtatgtttcctcctataacaatgaaagaagtatccattctgctgacaaattcagctccttttcctgtattcatgatcatgttccataccctcttgcctttgcaaggactttacttctgcagatatctcctaccttgcatcatcaatgtacctctttctgtatgatcatccccaccagcatttaagtataccccaggaaatcctttatggaccttctcatgacccactggaactccattttcctgtccctcttcttgttcttctcagcaaaacttttcattgactacttactcaaatttcgttatctccttctccacttcagacaggcttcttccccacagtctcctgaagctgtttcttgcaatgtcgctactgacccttatgctgataaatccaatggtcatttttctatgttaatctttctcagtctttcagcaaaaactgatgacttcctttaccttgaaaccattatcattctcatcttccaaaccaagacactcttacctgttttttccatacttccctgttgtctcttagtcttttttgttctatctctaaatattagagggtcttggggctcagccctgagcctcttctttcttcatttcttcttcctaaaaaacctcaactcatcttgtctcatggctttgaatactatttatatgttgatgactcatatttattatctatagttctgtcctctctcctgagctgcaaactgcctacttggcatcttgatgtggatgcctagtgtgttagatataccaagtctgaatggaaatgattctgaacacaattccctacctcaaggccacaacacacacacacacacacacacacacacacacacacacaccacacacactcctttttcaggctttccatcctcagaacagggtaattctatcaattgtgtagcccaagtcagaagtctagaagtcaggaatcctcccatttcctcagccccacatgtaaaacaacaaaaaatcttgccaattctatttctaaaatatatccactgctcaatcctttgccaagcttcattttttttttttggccctaaactgtactctttgcttctaaaagtaagcagttcgatccactctctacccaattgccagaatattcctttaaaaatgtaagtcaggccttgtgattctcctgcttgaactctccaatgacttctattcaggataacattcacatatctgtggtctaaaaagcccttcatgatccctcctgctgagttttctgacttgatcgtggaccattctgctttgctcattgcatcccagccacacttgccttctgtctgtccctggagcataccaaatccattcctcctgttaggcctctgcctaaaatacttgtacccagcaatttgcctggctgcttccttcttccttcttgtccttcagtcacaacttaaatgttgccttttcacaggccttccttaaccatcataactgaagttgcatgccaccctgtcccttctccttccagtgcattacattgtgacatatcactctatttcatatttcatgttcagcaccttcttatttatttcctggtatctatttacagtctgtctctttctgttggattataaattctatgagggtgggaaccttgtctctgatgttcacagatacatctcctgtgcttaggactgaactttggttaatatgcataactgttgttaaactaaataacaaacagggaaagaccctaaaaaaaaaagatatttgtttgggaatagaacattgcaatgggaatatgtgtgtgattatgaattgtgtgtatattcaaggaagtaaaagaagacaaaggtttttaaaggaaaaatatgaggattacataattgttttagaataattatccttggctacaaagaccaataacaagggtgatgccagtttgaggttatacaggcagatgccggaaggatgttcttgtagggttgcagtggcttttgtgcacggttgtggtttttcagtcttttatgatagtttgggttaacaggtatacaagcatgagaaccctattttcatggccttccctggctttctgaaggtgttttttgttgtttttttttttattacattagtgactctattttgattctgacaactttcacatcatcattcaaaacttgcttatcaaataggcaggaaacccagtattaaggtatttgattatatgaattatcagtctcaataatgattttccctcctacctgctttctgactaaaatttcagttttatttttattatcctatatgtttgtttttcatccatttcaaatggatttccaagccattccaggtaaagtccctgggcccaagtaattaaatatatctctgttcatttaactcagaaactgcttcgcctgttagttttaaacatggttggaaggatatgtgtctgaatgtcaagtcaccatctttgatcttcaatccagtcatgatctcctctgagttttactcctggctacagaaagatgtgaagagggtccagtgaccctcaagaaaatttgtattacttgatggcccatggcttaaccttcccttttctgatatgatctgccttgtgacttgggattctggctttcgttactaatgaggattgatgttcccaaaggaagatagcccttaagtctccttattggaaatgagaccctcccattttttatcatccagaaagtgtgatccgtatctcctttcatcatggaaagttatgctgtgaagcacccttctgcttttgctatttctggatcttcattccatcttcgtccatgtcattgccactgattaaatcgtgtaaatttaaattggttttccagcttgtggaggataatttgatattgtccttatttacatttgataattacagattaagtcacttgactagagtcactagtacaagtagtatcaggatcatgaagtttgtcttcattgaggtcaaaccctgatattccttatagaatcttgctattttgcacagagtaagcacttggagacttttgtagttgttaatggagaaaactaaagaaactgaggaaataaatagaaggggacctatagtgatatctggctcccaataatgatgcctattcttagaaccagtctttgtgacttctccagtagtagtttggggtcacagctaaggtctggctgtgttttgggagctttgtgtgtgaccttgtgtcagttcatccatgtttatactttgactttcacccgtacctgtctcagacctgtttgaaaaaggagattataaatttgatatttaaatacactgctattctaggagggccttacaactgagtactttctttttttgcctggactaccatctgatctggaagaagagttaacttcttgttttctgcttgtcagtttagggcgttgaaacttgagctcgttctcatacatagaaaaatgacttttccagctatatccctaagtgtatcattgctatagtttcttacctatctcctagaataacttctgttccattattaataataatattgttactttaagtcacaggaatctgtgttgaaatgactgtccctttatctagttcccatcagaaagtatttactgagttctctttggtggcatattactctactagattaacagaataaaataatgaagaataatcaacatattttctcctctctaggcattaacggtttaatagctaagatagttatgtaaattcattaaagtaattttcaggatcatatgtgtactgagcttttacaagatctcttatatactttagtttcttatgctatcctgggaaagtttgtatttaaagatttttacctttttgtcccacaaattcacaaatagcgtacattagttatgtgcagtttttttgtgtataaataagacctcattgaagctgggaaaaatattaatatccgctccccctaccacccttataaaaaaaaatcaaaacatatgtaatcatccttcaaggcccttgccacatgcctttcctgttttccccagactctgacctcactgtgaaaaaacaagcaaacaaactaaaaccactaatttttacttgtaagggtgaaggagatggaacaattctgaggattttctgaaattttatgaaaaattactttctccatctctgaagtctaccctaaaaattctctgaacctctgagcttatttctgtgtatattcacccttactgcaatgatatgcattcttcattccataaaatattgccctattttagactttcattctaaagatcaaagttttcaggataattggtaacaaggcagaagcagagaagaggttttagcctctcttggtttttatgtttctgtagcctttgtctcaggtcctcaggtcagggtaagtttctgccaaggtttccttttgctaagcctaaaattcagagtaaccaatcttaagtttgctgttgagatatcttgcaaatacaaatgctttcttgggtatatcaagaggcattctttatcacctccctagagatcttcaagtggtcagatgctcagcagttctgtaaaggtgagtaatcctgtaatagaggcatatttgggtctgtcgctgtatctggatgagataacatgttatgtttaagataaaagaccagtaaattcacatgtcatctcaagtgaagagggctcctgagtgctccatgcttccttttactcctaggggcactgggtatgagggttaagtcatgatagctggccaaacctattcatcctgtgatctttatgactttgatctatggtatccatactgtgttagggtgaggttagaagttagagacaagagatgttaatattacctcatcctcatcccattcaattcaaaaaatacttttaagtaactactagatactaagctctagaccagacagtggggcctgggagtgacataaaaatgaatctgatagtctttgcctttgagaaactcctacactagttgtaaaggccgactcttaaatatatattgtactatgaggtagttctcttatttaagaagtgctatgaggtcatagagaaataaatcataaatgctacctagaagaattagagaactataggccctctgagcagaggaaacagcatttgcaaaagcataagtgtgcaagaacatgatgtctctggaaaaaatcagtgttgttggagtataggctacatagtgaggaacggtagttgattaaatggattggagcttacttgtaaaaaaatatatgcattttttccctataaacagtggtaagtcatagtaagtttttaaatgtgcagagtggcatgaccacatttgtgttttagaaagataaatgtgcagtagtatagaaggtgtaccagcccaagggagaacaattagaaaagtaaattatgtcattcagtgatccaatgagagactactgcaatgacaaaatagttggtttggagagagatttctggagtccagtcactaaacttcagtaagtaattgaatgaagagaagagagtagaggatgagttagaggatgagttacaaaaaggaaatgatcactgtgagatttttaaggcagaagacttggtagatgatatcatagattaacagaatatgtataaaaatggaaaatgaagactataagttataactgaccacaaataaagttggcatccatgcacagaaatgcagactgtgtgcattaaacaagtagtgttctagagttgactgatccgttggaaagttttgtaaatgtaagaatttctgtgagtaaacataagcaggcctgtcagcaagtccagtcaggttgagatttaatataaaacacaaaaagtctccaaaaagtctcctgaatcccagcctcaaattctgtttgggttgatttggttttcttttgtagataaatcatgtgtgagtcatagagaactcctttaggactctgtgattacacacatgggtattgcatttgggttgacaatgacatattcttgtaataaagggtgagttggcaggagacagttcctgggtacatggataccagaacagcagttccaaccagaaaccatcactcttccaaaagagatctgagtaattgccacatactttttaaaataaataagcaaaaaggaatcacctccctgatccactccagagacactgcttcaagattaccagctagagaggatccctagaagagaaggaagttttggctgctctcttccagttttaagtctccagtgctactgaccaggagcttgaatttcatttggctttaaattgtatgagtccttaatctgtcacccctgcttgtcataaatgatattctattctctgctattctttcagtagagaaagaactaagtttttctaaaatgtaagtctagctgggagatgatcactctttatttttatttttattttaagttctggggtacatgtgcaggatgtgcagttttgttacagggtaaacgtgtgccgcgagatttcttatctctttgtctttagatatctactctttggtgactcatctgctacatgtattatctcagacaatattgtaacctgggataatgacatgccttttaatgaatgtaagtaaaacaatctctttattgcaccctatttaattcctcttgtccccttccagagggaaattgagcatctgcacaccaaagtgagtagccaggagggtttacacttggtttgagtagctctaggcacacagctatgacttacccatcttcctcatggcccccaatcctaccacacgttcctttgtttactgtcctttgattataagttatttcatagtgagtaaatgcttacatctaaaacattccaggagattacacactgccaactttattccatgcaaaaagtaagccaccctaggtcccttctataacaatttatctgtggtctggggcggggactggtgaccagctcatagcttttcggtttttatcagccagttccatatatcttttgaccttgctacttcctatttagaatcatctttgagatcaggatacagaatttcaacaaaataggtaaattgtaggctgagttgcagtttggattgcaagaatgaagagaaaattctcagaaagtataatattctctctttccccacctactccttaaaaaggtattccttgtaagtcactcccagccatcccccatgggactttgacagcagcagcagggagaggggtttgctatgaaatcatcagtgccatattggatgtaatagggaaaagctgtttgacctcttggatgagaagtcaatgcattgcaccagcaaagataatcaagttgatgtctggagctctggagcaaccctcctcttcagtgtattactcttacttgaatgctcaattatagaagttgaaaatggagttgtggaatctggattatgttcatttttttaaaatgatacatgatatttaagtgtaagcttggttttaccctgaaaggcagcaatgtaatatggtgtcaactaaacagcaaacagaatcctctactgccaaagtgcttcaggggtgagttgggctgaaacttcaggatctagaaataaaacaaggtttttctgggaaatagatatatggtacctatggaaagagcagaaggaagatagtatatgtggttgagttttctagttaaagagttttttattgttattgtttgttttgtgtttctgtttttgtttttttgagatggagtctcgctcagtcgcccaggctggagtgcaatggcgtgatcttggctcactgcaacctccacctcctgggttcaagcgattctcctgtctcagcctcccgagtagctgggattacaggcatccaacatcatgcctggctaatttttgtatttttgtagagatggggtttcaccatgttgaccaggctggtcttgaactcctgacctcaggtgatccacctgcctcagcctcccaaagtgctgggattacagacgtgaaccaccacaccctgcctagttaaagagtttaaaagtaaactttgaaagtaatatctaaatgttgcagatgtaggactttttcttcttttgtattttggggcagtgctagatctgtgttattgtaggggaaattaaaagatgcttttttaaaaaagcagatagcaccaaagtcaatgattagagattttttcatacatatatatatatataattatcacatcttatccataggtgtgctttgaacatatatatgccactcttctctgtcttctggaatgcagaccaaagatgttaaattgattcagttgagtatatattatactgcagattctatatgtataaagacaacagttctcgaaagttacccttactgaaaccaagtatagcactgatgtgatgaaacagtttggctgtatcttcttatgtcagttttcactgaagacctcctcttggagccaaagggaagttaactgaaagttctagaggttggcaattttccctttattctgagactccctcagaaaaggcgtgcataacaaagtaaatgtaaacaatatccttcatggttattaggacaagtaaatgaagaatatgaggccattattcaaaacctctgttcacttcctgtggctttttcaaagtgttccagcctcaagtcaggacaaatcacctgtactgaggctctagcatcttcagcagcaggaccaaaagtggtcatctcagcctgtacccccagttgtgtgtttgaagcagccattgaataattagtatgttccaggtattgtactttctctgttcatgtacttttagcactggattctcactataccttatgaagtagtttgcgttatactatagactaagaaactgaagcttaaagagagtaagacttgcctgaggtcacacagctattgaatgaccgtggggagttgaaactaggtccactgagctcaaatttccctaatccatggtacctccccacatgtaactatcatgccactaatatgttattttcatgtgctgaatttgccttttgtttcattattaaaattgattagactcagaacttttggatatattcttttcattattattgtttggtcaagatgatttatgttgatctgtttgctgaggatgaagaaaaaggtaagaatttaggagtttgggagtaagcagggaataaataaactatacatatttctaagtctgtttctgaaaaagttatgtgatctatatttggatattttacctacatttgaatattttctcaccatgatcagtatgcctaccaagttccttttctacttttcagggatttcttgtggctctcctccgcctatcctaaatggccggattagttattattctacccccattgctgttggtaccgtgataaggtacagttgttcaggtaccttccgcctcattggagaaaaaagtctattatgcataactaaagacaaagtggatggaacctgggataaacctgctcctaaatgtgaatatttcaataaatattcttcttgccctgagcccatagtaccaggaggatacaaaattagaggctctacaccctacagacatggtgattctgtgacatttgcctgtaaaaccaacttctccatgaacggaaacaagtctgtttggtgtcaagcaaataatatgtgggggccgacacgactaccaacctgtgtaagtggtgagtatgaaaagaaagctgggttgggaggttggggtcttgcctttctgtgcagaccacgttttgtaccctcctgaaggacaaacattgtgaacatgtaatgatgagggtggaagaaggaaacaagggaaaaggtgaaagttatggcttcttcgtggaggcatataactgctcgttcaaaaaacatcaattgagcaaaggagtttaaagtacatggaaaaatgtaattaaacatacctaataattgagtagggtaagttttgcaaggatggggtcagagtttgttggggatgtgggaatggggtggttttcaactgtatatctgtgttactgttaaaatgagaagaacggtgggatcttatagcaaaaatacacccaatggatttgaaattaatgtataagtagctgctaacaccgtctagcacaggtgatatcctgctctctgtggtctctgtaaacatgttttgaagttatccactatttccccaagtcatcttctgagccatcacatttcaaataaatgcctttgaaaatagggacctactgtaaattattcattccttctcttttggtttggtttatgttgctgctgaaatataaatctgaatttgaattccacaattacaagaaatggcaatatttgacaaaaattatactatcaaattaggtattttcttaataaagaacaatattgacaaattttaagcagattaaagagctgacaaaactgttaaattagtataaaatgggattctgtttattgattgattgattgataaatagccttggaggaaggagatcttaacgatagttacaaagggcaatggctgctgaaaacagttaagcctttgtaacaatttagacagacatatatgtatggacatggaaggatatcgtatacatgtcgctaagtagaggaagtaaggcatagaatatgtattagttgtacacacacacataatataggtgtatatatgtatcatgcataggatcccaataaactatattgccaatatctaccaggatagcccttgaaatgatagcatgctacttttggaacagagaataagcttaaggatagggtgagaatataggtgaaaattgactttttttggtaattgaaatttttcacaaggcaaatgtaattcatatagtgtaactaaaaatgaaaaataaggtactatttatggctatttgtggcataaaatggatacacttaaaccacacctgtttgatctttaaaagactaggttgaaagttaataccaactggctaccatagatcatgtgtcatttatttaaatccatatcctaagtcagcatctcgatcaagcttgtccaactcgctacccgtggacagcatgtggcccaggatggctttgaatgtggcccaacagaaattcataaactttcttaaaccattatgagattttttttttgcaatttttttagcttatcagctatcattagtgttagcgtatattatgtgtggcccaagacaatttttcttcttccaatgttgcccagggaagccaaaagattggacccccttgattctagattgtgaaggatgcatcatctgacggcttttttttcctggtatgtgtgtgtaaagttttccctctcgagtgtccagcacttcctatgatccacaatggacatcacacaagtgagaatgttggctccattgctccaggattgtctgtgacttacagctgtgaatctggttacttgcttgttggagaaaagatcattaactgtttgtcttcgggaaaatggagtgctgtcccccccacatgtgaaggtaccctaaatttacaatctattttaagaatctgggctgttctgttatttgccatgcatttctcatctttggtttgttttttagaggcacgctgtaaatctctaggacgatttcccaatgggaaggtaaaggagcctccaattctccgggttggtgtaactgcaaactttttctgtgatgaagggtgagtgtcaggattatttatgagatttaattcatttgtcttgtgtgtgcgtggtgtggactgtgaaacctgcagaagtctcctctgtgaggatctctgggcagtctggggtagggttgtgagaggtaatgctgataaaaggaacagatgcacactgattgaaatgaacttgtcttgaattgtaagtagaggctgctgttcttcagcacaaactgcctaatagttctgaatgacaaccttctgtctccaggtatcgactgcaaggcccaccttctagtcggtgtgtaattgctggacagggagttgcttggaccaaaatgccagtatgtgaaggtaggctaggcaactatggtctgacagcactgcattctcagcttaactaaaagcttttggttcagtcattaccttacagactcttactgaacacagaactcctagagatctttaaggatatgtgcttcaccaaagcatccttattttttgtttcctcaagtaaaatggggttcctaggctttccctcctctgaaagctatgcagaccttctaagtaggtagaccatatgcataaagaaaatagtgtatttggtaaaagaaatcaaaggatcagcagagtacatatactcaggaatgaagcttgagaatcaatcttctaaattatgttgctttagctgccttgactgattcattatagactcggatatcactgtcctaggatagtggtatcaagcagcatctggggcattctttgttttcaatacacctatgatcttgtcatttctttctgcaattcccctagaaattttttgcccatcacctccccctattctcaatggaagacatataggcaactcactagcaaatgtctcatatggaagcatagtcacttacacttgtgacccggacccagaggaaggagtgaacttcatccttattggagagagcactctccgttgtacagttgatagtcagaagactgggacctggagtggccctgccccacgctgtgaactttctacttctgcggttcagtgtccacatccccagatcctaagaggccgaatggtatctgggcagaaagatcgatatacctataacgacactgtgatatttgcttgcatgtttggcttcaccttgaagggcagcaagcaaatccgatgcaatgcccaaggcacatgggagccatctgcaccagtctgtgaaaagggtgagtgttccggtactcagaaaaggtgcttctgattcgtttctgaaaaattagaagaaggggttgtgggctttaggtagggccttgtccagtttatacttccctcaaatctactacatctaatcaatataaattttgtagagggcattcttatcactagccccccaccattgttttattttgtgggaatatgcttggaaaaaatgttaggaatcactaagtttctcatttctataggggaaaaaatgaggagaaaaatgcttgtttgtcttaatagtgacttcttaaaagagaagtcattcaagccctcattcctagggatatatcagaatctcccataaaaaacatacaagatgattccttatgaagggaagaggcaggagaggagttgcagaacccagtggaaagtgaacaacatctgcagcagcctctgtgcagaaaacaacaacaacaacaacaacaaaagattgggaaactgtgatctaaaattacccaaagctggtctgcaacatatgttctgtatcatacagctgacgccagagtggaattatagcatgaatatcaatttctttggctcagtttctttctgtggttgtttacttaagcagttatgttttgtttttgtcctttcatttagaatgccaggcccctcctaacatcctcaatgggcaaaaggaagatagacacatggtccgctttgaccctggaacatctataaaatatagctgtaaccctggctatgtgctggtgggagaagaatccatacagtgtacctctgagggggtgtggacaccccctgtaccccaatgcaaaggtgccaggcctcaaatgtagacattttgttaactttaagattgccttgaattaaattctcatcctagtctcttttcttagtggcagcgtgtgaagctacaggaaggcaactcttgacaaaaccccagcaccaatttgttagaccagatgtcaactcttcttgtggtgaagggtgagtgaaggctgacttagtctgacccaattccggtgtatcagcacacactgcaggctctatgtaagagtttgtatcagtacaccctgcaagctctatgtaagagtttgtctcataggtgcttgcctgtcacatggtcatggaagtgtctatcatactatttttccatgcatggaaattatgcctgtgcaatgagaagttggtgctgatgttggctacatttttgttgctattgcttcttggcctgaaagtagtgagtctgcttgggagccatggctcttgcctaacttaatggtcacctgatggcaaaatgacatacgtgactctgtctctaggtacaagttaagtgggagtgtttatcaggagtgtcaaggcacaattccttggtttatggagattcgtctttgtaaaggtgagtagcaaaaatgatataggagctgaaataatgtgagatctatacatttcctgggagatttttgttttgggacatgttatgagaattagagtattagattctgttctattgattctgccaatagttatggttgcacagttttaccatgtctttcttttgctacctttttcttcatcaataacttaaatctactttgttactgattctattttgtggtttacgattatgggaataatgacagcggtgagtatatgagccaccatcttaattttgggtataccacagtttagtggagagagtaagggataggtgtcagatctgaattcacattctgtctctactgcttactagtgtgagaccttggaccacttgtacaactcctctgaaactctagcctttcttctgtaaagttggcataagactacagactaggaggtccagagaatgtaaataaaaagtaaaaaggaccaggcacagtggctcacgcctataatcccagcacttcaggaggctgagggcggcagatcacaaggtcaggagatcaagaccatcctggctaacatggtaaaaccccatctctactaaaaatacaaaaaattagctgtgtgtggtggcatgcatctgtggtcctaactacttgggagactgaggcaggagaatcacttgaacccgggaggcggagattgcagtgagctgagatcacaccactgcactccagcctaggcaacagcgtgagactccatctcaaaaaaaaaagtaaaaagaaacgtagaaaatttaaaaaacactacagacttcaaattattcaaattaaattgtactattgctactttctggatgaggaaactgcctatcacaaagtaggtgctcattcaacaataagttttctcagctagccatataaaccatcatatcacctcagcacagagtaaccaagaaagcataattctattaccctgtgtcttttattctcctattgcctaattaaaaagaattcttcttttaattagcaatttactactgggcctaactaactcctaatgtgatgttgatcaaccacattcactttgaataaagattttctttcctatgaaatgtgtttaaattgcattttacatacttaatgagctttcacacaactcacatcatgaaaatgtacccataccgtccaggaaacaacagattcataaccagcttcatttggtggttctttgttctttggtgtctaatacaggaactcaattctacagtatcttttcatctctctagaaatcacctgcccaccaccccctgttatctacaatggggcacacaccgggagttccttagaagattttccatatggaaccacggtcacttacacatgtaaccctgggccagaaagaggagtggaattcagcctcattggagagagcaccatccgttgtacaagcaatgatcaagaaagaggcacctggagtggccctgctcccctgtgtaaactttccctccttgctgtccagtgctcacatgtccatattgcaaatggatacaagatatctggcaaggaagccccatatttctacaatgacactgtgacattcaagtgttatagtggatttactttgaagggcagtagtcagattcgttgcaaagctgataacacctgggatcctgaaataccagtttgtgaaaaaggtaaaaacccaataagggggaaaaaaggagagatttacttaattattcttgtttattatctcccacccaaaactgcatcatggaaagaggcaagaggggcacagattactttctgtttcttccatcctataatagatgttctctgtgttgtgtgtgtgcatgcaaatgcccccttggatctgggatctattcagggtagataatgagagagcctttttaaagagcaaacagcattcagtagtgaatttgagcttcatgatctttggcatcagagtttcagactgtctgtccaatgttgtacacttagtgttcttgagtagaaattcctctgtgttggtatttatgtagggagtttttctcttcaggctgccagccacctcctgggctccaccatggtcatcatacaggtggaaatacggtcttctttgtctctgggatgactgtagactacacttgtgaccctggctatttgcttgtgggaaacaaatccattcactgtatgccttcaggaaattggagtccttctgccccacggtgtgaaggtactttaagttccagagttgtccttctctttgatatgagacatctataaatactgtaattccatccttgcttctccagaaacatgccagcatgtgagacagagtcttcaagaacttccagctggttcacgtgtggagctagttaatacgtcctgccaagatgggtgagtatgaagtggtctattctgagaaaaggtctcaaccttgttttgtggattaacttgaccttcaacttgtcttggtggcatcctttagaggctcctcattgtcacaggcatggagaatatgaggttccaatggcctaaatagcaactctgactcttcagtcgtctcttgacatggaaagggctttgcttaactcaaaagtagtttttttacttggagtaaaaaaaagtagttttttactagaatttcaactcctctctgccaaagttcttatttagaagtccctttttgcatgcagtttgaagagatatgatattgggaacaggaaatgcattataatctgtctctctgtaggtaccagttgactggacatgcttatcagatgtgtcaagatgctgaaaatggaatttggttcaaaaagattccactttgtaaaggtaagttagaaaaaataaaagcctgacaatggtaatggaggattagagagggcaggccactgaagaattagtctactgctgcttcagcagtcttaggcgtctccctcattggaggttagataagaaaaatcttatggtgttggtcagtattgacactgagaaacaacattgtcaagtaggaactgtttttcatgcatctgctaattttgctaacaataacaaaatatatagcccatattcctaggtcatgggaacatagctgtatttctttcttccttcacactttactctattttctgaatttttatggagtatatagtactcctataatcacatttaataaagctgtttttaaaaaaagcataatccatattccaaaatttaagttattttctagttatgtgaaatatatgcagttgcatattgtcatttgtacctgaatgaagaccgctcaccttgaggtactagctgaagtagaactccctaaatctcttctgcagttattcactgtcaccctccaccagtgattgtcaatgggaagcacacaggcatgatggcagaaaactttctatatggaaatgaagtctcttatgaatgtgaccaaggattctatctcctgggagagaaaaaattgcagtgcagaagtgattctaaaggacatggatcttggagcgggccttccccacagtgcttacgatctcctcctgtgactcgctgccctaatccagaagtcaaacatgggtacaagctcaataaaacacattctgcatattcccacaatgacatagtgtatgttgactgcaatcctggcttcatcatgaatggtagtcgcgtgattaggtgtcatactgataacacatgggtgccaggtgtgccaacttgtatcaaaaaaggtaagatacttggaagggataagttatgggatgttgtacagaataaagaaaagaggttttgaatctgcacttgacattctgcctaaagaaaagcatctaagagctaaggcagttatattgttttacaagatatttgccttttcctatcttctcacttgattgtttgttttctctttcctttctcagtatattgagcaataaatagtacatgaaaggataatggctaacttccaaattgatagcatctccaaaaattgttattgttatgactttagtgtaagaaaaatgcacatacatttttggcaaatgtttggcagtaatattgctaattatttgatatttaaggctatgttgccagccagaaagagaactttgggtgttctggagaattaattggccctccaacccattgaattgtctttcttgtaattgtagttatcatttggcagccttattcctgtccatgactatctacagcagaggctgtttggcaacggttgtctttgaccagcacagtaatcttaagtgaaacccatcttcagtttaagataaatagtgagcttgcgagccacaagaccccctttgcttcccagcaaggcaccagtaacttgagctgagcagtggctgccacttttagaaggacaggggctctctgacttgtcgtatctggtggcttcacttcctagctctcgtagacatttgaaggtgtaaccatgtctgctatttaaagggaaaggaaaagaaaactgttggctgatggattaccattgtgaactgtatccattaatgtttcattatcttattttttaacacttttcttcaaatcatattggctatcagtaggaaatgcagatctccatccagtgttgctggtctgggtggaatgaatgaatgtttttggataccagttagttggcttgttgcttctggccttcctgtatcgctatcacccagagatagtgcaggctatgtgttcctctgtgctgagttaaagaccctttcttattggtgtctaagccttcatagggtgtccacctccgcctaagacccctaacgggaaccatactggtggaaacatagctcgattttctcctggaatgtcaatcctgtacagctgtgaccaaggctacctgctggtgggagaggcactccttctttgcacacatgagggaacctggagccaacctgcccctcattgtaaaggtgctttgtctattttttattcttatttttatatcaaatttgtgccaaatagatatattcagttgggtactttcaacttaaaatagccaaagaaatgaattaactgtctgattacattaaaggctttaattagattaatacaatcattaaatatctcaaaataagaaaaaatgtctcaggctgtagtctatctggtgaatgaccacttatgtagtcatttacacatagaaagttggagttatgtctgtaaattaaacaaccaaagcacagattgtatttacacactgtagttacagttatgttaagtgtgtatttgataaagtaccaataaaaagcacagcaatcttttgagaatatttactgagtgttggtgggattatgggtacatttttaataaaagtttcagaaagtcattttcattgtcataaacagtgcatatgaaatatgactagtaaattagtgtctagtattcattgaacactttttactctatgccagacactgtgcacagcacctgacatgcattatttcatttagtcttcatgagagccacatgaggttggtgccatgattatccctgttttatagatgaggtttcagtagcatggagagatttggaacttacccaaagtcacacatctaggaagtactagagccaggcttcaaatccaagatctcactgtgttaatccattctcacactgctaataaagacatatctgaaactgggtaatttataaaggaaagagatttaatggactcacagtttcacatggctggggaagcctcacaatcatggcagaaggtgaaggaggagcaaaggcacatcttacatgatggcaggcaagagagcgtgtgcaggagaactgtcctttataaaccatcagatctcatgagacttatttactatcacaaaaacaacacaggaaaccccacccccatgatccaatgacctctcaccaggtccctcccatggcgcatggggattatgggagctacaattcaacatgagatttgagtggggacacagccaaaccatatcactcacactattgatgactacactgaaaagaagaaagaaatgagaaagcacgcacatgtatgaagaattagagagtaaaactagaagcagaaaataacagtaattcagaatacttcataatattaccaattcggccctcaccatttctccaagaagccattaaaattatccatcactgtttggatagaaactgaagcaaaaaacacaaatataatctggcttaaattacccagaggttattgagatagagggctgacagtaaaagattgtgtctaggatatagtcttatcctatttcagtgcagctttccttactgagagtgaaacaggttggttttataaatctttctattaagggaaatttctgctttcttggtaaaaggccaaaatatgactgtgcttgaattagatttctttaatttcagaggtaaactgtagctcaccagcagatatggatggaatccagaaagggctggaaccaaggaaaatgtatcagtatggagctgttgtaactctggagtgtgaagatgggtatatgctggaaggcagtccccagagccagtgccaatcggatcaccaatggaaccctcccctggcggtttgcagatcccgtaagtaccaagggcttcaccgccgcttgtaactggctaacggagagaagagagtgagagtttccctcagcgtggagagtcctgggttttaaattgacataggtttgtgaccagttgtataattacagaggaacttgaagtcagtggtctattctagaaaaagcacagcttggccaggtccgtgacttctgcctgtgataccagaattttgagaggctgaggcaggaggattgcttgagcctaggagtttaaaaccagtctgggcaatgtagtgagacctggtctctaccaaaaaaaaaataataataataaccaggcatggaggtgtgcacctgtggccccagctactcgggtagctgagataggaggatcacttcagcccaggaggttgaagctgcagtgaaccatgattgcaccaccgcactctagcctgggcaacagagtaagaccctatcaaaaaaaaaaaaaaaaaaaaagaaagaaagaaattaaataaaataaaaaagaaaaaggaaaagaaaaaacacaactttcttaggatggggaaagtgaagaaaagaaaatagaaacactaatttaaaaggaacaaaaatgtgaaacaagcaacctgaaattttgaaaggagttgctgcatagaccaccctacgtgctgaatctgagttaataagtgcttacaatttgacagggaactccagaaataggttaaataaatagttgttacagttaatatttgcattctaacctgagaaatctctgattataaagttgagtatattgtttttgtcattggtggactcccccaatctacttagagtgaaaaaaaaaggccagtgagttgctacataagaaacaagtggatataactcaaggttccaatacatcttttttatctgttgttttttgtttttgtttttgtttttgtttttgttttaaatagacacaaggtctcactatgttgcccaggttggtctcaaactcctgagctcaagtgatcttcccaccttggcctctcaaagtgctaggattacaggcatgtgccactgtgcctggccccagtacatcttttaaatcgacttggaagggagctagagtgttgatttctgggacattaccatgaaacgtggggctacattgaattatgacactatactgataatcattttcatgattttgtactatttttaggttcacttgctcctgtcctttgtggtaagtcttcttaaatacttgaagaaaagctcttataatattttttaaaaatatgtaatgctagaggtcctatatcctatctgatgatatatttaactcatagggaatgttctctttttggtgttttaaagatacttcaatgtacatgtcacattacaaaatgtcactttggcatagagttggataaattatttgaacagccagctctttcttctttttaaattgatattttagtttttattaactgttggtgtttggcttgatttggtctattgaaataggcaggcttcttctgctgtagcaaaatacatttcacagctgagagttaaatgttatgcaaaattataagaacctggtgtcctgtgcgcctaatttctattcttgagatttctctcttgtcacctcagtgacaagattgttactaataaaactaaaaggaacagaaaaactcaatgaaaagttgactggaaccttgtggtcatgtgcttggtgctttagattaaaggtggactggatcaaatcagaaaaaccttaagctcaactatgattattcaggaattcagcatttatgtccaagaagagttaagtatgagtcacataacattttccccaccactagcaataggccctgcaatcagtcagaacaatgtaggtgatcgtcttctggcatttgatacttgctggatttttcttctaggtattgctgcaggtttgatacttcttaccttcttgattgtcattaccttatacgtgatatcaaaacacagagaacggtaagttcaaaggcgaatacttgattgaccaacatgcacaagtggtttcggcttcttgtctgaaactaaacacagaagcacaagttatgtgaaataaatactgcaatgtgataactaaatgaagtatctcgtgctatacaaaaggaagccctttctgtaggacttaagagatatcaaacacttagcttattttattgaatgatgtttattcagatagtatattgtaaacaaatctagagaataggaaaaaaatcccagtgggaacgactgcaaatactttggtgtattcgtatctgatctttttcgtatattttttctctctttaaactgaaattttgtcattttcatcttctgtcttgatttttttcatttagactcatgtttatgtttttatgctttaagtcatgttttcagttactaaatagcatattattctattctgtgtatttatatatgtatttatgtgttttaagttccttccaaatttactttgataatatataaagataggagtagcacctctggctaaaccttttttcatacccacttatttccttagaatagatttctagaattactaaagataagtgcatgagcatttaatatacttgataactattgtcagatgacttgccaggaagtttgttcttagtaatatttaatgtactgggatatgtcgtgtttctcaaccccttttcctgcttcattgatttgcctgttccattacaaaccactttgtgtttaattaatacctttatgttattatatctggtagggcaagaattcacactacaattttataggactttcctctctattctcttctgtttgttcctataggtgatttttagaatcatttataatttcaaaaaaaaattgtgattacatttaagtctatagataaatttgtgagaaattggcatcttttctgtaatgtcttctcattcagaaatatactaggtctttccatttgatcaagtaatcttttctctcccttagtcattttcatgattacttaatattaactatattactacgtttctatgttttggtatgttatgttttcttatccagaaattagatatatttttgcatattatttttaattatttttaaacatcttaatccattaggaatttattttatggtatggtagttgaagtaaacctacttgtactttttttccctatatattcaattttttcaaaacctattttgagtaaaccatcccttcaccattggtcatagttttctttatcagataaagcacgcctattcaattcttgtgtacactggggcttatgtcagagatatctgacataaatatgcaagatagattatattccactgatcggcctgtctctatgagccagagctactctattaataaatgtagctttttccgagatgtgttccccctcttcaaaactattttgaaattttcttctatttatttttgcagataggctatagaattatttgcaccacgactacacctcccataccctagaaaaataaaataaaatcttagatcattgataggaagtgccttaaacctatatatttatttgggaagaactgacctcttcatgatattcactatttccttccagaaataccagatgactaattattcagatgttttgttatattttagttaaaatttaatagattaccttatataagctacatagccataaaagtatcttatttttattgctttataaatagaatcatttttggttatgtcttataagtaattgcaaatgatatctaggaaagtctatctttatacagtcattaattctaatagcttttcagtgagttacccaatcatctaagtagaaaactatattttctaccaattattattattggtagaaataatttctacctcatatctaccgattatacattttcatttatttgtttttgtctcattttactgagaagaattttaaggaaaatcttcagtaatattagggaatattggcatattttaacctttatttttaatataaagcctctagtgttttatcactaaaaatgatactgcatccttttttcttttctgtattacataaagtgtatttatagtcacaaaagttgtttttccctatttaaaatcactgaaaaatcttgtttcccttctttaagcatatttttatatcactataaatatttgcataaatttttaaaatacaaaagtaaatatgcttgttgtagcaaattagtttataaagatactgaatagtctcttccactgaacaactgctggtgccttcaagtccaacatattaagttgatggatgtcagcaatttgctgtagatactttcatatgttgctctatctagtatatacatgcatggcttttaaaacatttgagcagtaatgttagagaaatagaagtcatgcgaaaagaggaatgaccacgtccatccattcttttcttatacaacaatggctgagtgcctactatgccttagcactatactaggctagaatcacaaagcctagtagcatatggcctctgtcatcaaggaggtcacagcctggtaaaggaggacaagcatgtcgctaaacaagtaccataaaataacgtcgccatggtggattatatgatatttggtgaggatgcaaagcaaatggttaatatttgggagttttaatcaggaaaagtttcagcgtggaagagatgtttcaggtgagcctcaagagagtgtagacaagaagagaaaggcattccagacagaaagagcagtttgaataaaggcccagaggcttggctttccatcatgtgttgtgagaactacataacccatttgaaatggctgggaaatagtgtgtgtgtgatggtgattgaaggcgaaagtggcatagctttaggtggagacatgccattaaagaaaaaaaaaaaaaaccctgacacgtaaatcttgtggaagctacagaatactaatatgtgcaaaggatacatttttaacaaagcataccgtcaggtgttggcctcggatgttatgtgtgcataggttcgtgagtctttgtacatgctagtgttagggcggataatccaatgaagtcttaccaactctcaggtagctccgagtggggagatgaccaagtcatgccacctaaaacatgtcaccaaaaagctccagcaaaatttctttcacgtgccaagtcccctgcatctatcatttaccctgccaccagtgccatctgatgccatggctcagttatgtaattcctagaataggctcagacatgaaggggttgcactgaaactatgtactgagggtatctacgaacctgggcagtttgttctaggctggaggcgggagggtgagggctgcctatggggttctggctgtcctgtacagttagcgtgtacttagagtgtagagtttaccagagtgtgtaccacacaaccctgctttcatgaatgacttcagaaaaaaagggtgttctatggcaaataagatttggacatactgcacactgttttttttttcttgtggagaatcacaaggaccatgagaatatttaataagaggttttttgctatcaagaggacaggatttccaggacttggtgacatgctggatgtggggagaaggaggcacatagaatggctcacatgaaggcgatgaggtggaccccctgactcactaaaagaggagaggggcaggatttgtgggggaagatgaggagttcggttctgacctggtactttgaggtactcatgatttagggcttgggagaagggtctggactcgggtgggtgacacttaaatcacaatgaaagctgtggaaccaaaaagaacagaacagataaaaattgggatgagaacagccctcagaagaacagtaatgttcaaaaggcagaaagtgaaggaagagaggcagggggaaaactagcagagagtagcgtcacagaattcaaggagaaaagggtctcaaaaaaaattagggatgtcatttgcagggccttcctcataggaagtcacaagataatttcagccaagaggcattagaaatgtaaatacatagaaaatacagtctctatctctttccttcatgctactgagtttgctatcagagcactgcatgtgtataaaaatttgcaaatttggggaatgcttacaagtgcaaataatttataatattccagtctaattattgtttattaatatgattatatcatgtactatacttaagtgcctcaactgatatgaagcaaacatacctgtttaaccagattcctagttgccattcatttatttccatttgctaacccacttcaattgattttccaataattgataaagacacttgaatggcctgaaatgcttttttaaatgagatgagtaatcatttaaaaatgaatgtctagtgacaatattaaatattttgaaaagccatctaaacacttgaaagacactatgctattcttttctagtcatctaagatattgtaacaaagcttaaatctcacattgacctaaaaattactgttttataatcttcttaacatatctcctgtacacggaactcttcaatattctagtgagtgacatgctgtcagtgtctttagcagtattctttcttccccagtaattttgtattacgttattttagagctttacatggtagtataatcacattttattgtcttttagtaattctggcaaagtggttttagaagcacaatgaaatatgtgtactttcaaagaaggaaagtaaaaacgttctcttcaaactcgtttaaagcttttaagtcagactagaacattgagtcccaaaagggtaaagttatgatctaaaataagaacttatttttgcttcttttcttcaatttggaagttgtagttgttagtcattaagcgtcctggatcctagggtaaagctgcttagtgtcagcctctgacttgaacacttacaagcctagatcattcattttttatgtgcctttccaaaaaatggagttacagtgtttacacttcataggataaaaacaataaaaatgaaatcatcacagaaaaccaaacaccgtatgttctcacttgtaaatgaaagttgaacaatgagaacatgtgggcacagggaggggaacatcatacactgggacctttcacagggttgggggttaggggagggatagtattaggagaaatacctaatgtagatgacgggttgttgggtgcagcaaaccaccgtggcacatgtatacctatgtaacaaacctgcacattctgcacatgtatcccagaacttaaagtataatttaaaaaaatgaaatcatccacaaaagtacttaccatgtgttgggaattatggaaagcaaacaactgctacattgaaacatggtcaatgagtaaagatattacatttttctttcttcttctgtttagcaattattatacagatacaagccagaaagaagcttttcatttagaagcacgagaagtatattctgttgatccatacaacccagccagctgatcagaagacaaactggtggtatgtaatgaaatggaatattattaatttacatataaaatttccttcaacttgtatttatcaataagcgtagcattcacggtgtatatacatgcttcttactattgcacaagtcttcagtaatcatgcatagcaattgttcatttacctacttcattttgccaactaatgttccaattttttaatccattcatccattcaacaaatattaaactaaatagcaaaacaactaagaataaaatcaataagatgataagcattatatagagacataataaagcaggcaagggggataaagagaacagggtggtcgcaagggaagctcttactaagagaatgtcatttgagaaaaaactcaagggaagtaaagagccagggccggccttggtggctcacgcctgtaatcccagcactttgggaggctgaggcaggcagatcatttgaggtcaagagttcgagaccactctgttcaacatggtaaaaccctgtctctactaaaaatacaaaaattagccaagcgtggtggtgtgcacctgtggtcccagctactcgggaggctgaggcaggagaatcacttgagcctaggaggcggaggttgcagtgagccaagactgcgccactgtaccccagcctggacaacagagcaagactgcatctcaaaaaaaaaaaaaaaaaaaaaaaaaagccagccatgtggccatatgagggaggaggattccagaaagaacagtaggtgcaaaggccataaggcagtgtgtgccagctgtgttggcggcacagcaaggaggccagtgtggcctacagttgtagagatgaagtcacagagatgggggtgggatgtgggcgagaggatgatcgtacaaagtctgctatgtcattgtaatgggatggtgggcaggagaggatgattgtataaagtgtgctaggtcatggtaaagagattggtttttatttggaagcttttaaggagaggagcaacacattcaccttaactgctgttaagaacagactgtaggaagccatgggtggaagatgggagtcaatgaggaggctgctgcaatcatccaggcaagaaattgtcagtggctaccaccaggttgtaagaagaggccagattctgcatgcaattttaagacagtgacagtaggatttgtggatagtttgtatcagaatatgagaggaagagagctgtcaataatgacacgagggcttttgcctaagcaactggaaggatagaactgccattaattacatgattgagattgcaaagagcaggactggggagaaaaatcaggagttccactgtggagatgttaaatgtggatgtctaatagacttggcaagaagacagctgatgtacaagtctgtattttgggcaattggtccaggctggagataaaaatttgggctttgtcatcatgtggatgtacataacaaggagactgaataagatctccgggaagtgaaagaggctagcaaaaagaaaaggtccaagtactgagccctggatcctccaacattagaagtcatggagtgagaaggcacccactaagaagtgaaggagcagcctctgatactatccagagaagaaccttaaagtcaggcaaagaaagaattttagggaggagggagtgatcaactctgtccagtgttgctggtaggccaaaaaaatgagccctgaaaactgaccattgaaattcagtagcacaatttttttgctgttgttgtttgagacagggtctcactctgtcgcccaggctggagtgcagtggtgtgatctcagctcactgcagcctctacttcctaggttcaagtgattctcatgcctcagtctcctgagtagctgggattataggcaagcagcacaaaatttgctgctgaacttgacaagacagtttttgaagagaggaaggaggcaggagcctgactggacggagcttaagagagaatgaaaggagagaaattgcagctatcaaatacagacaactctttctaggtttttttctataaaaaggagcaaataagtaaagtgctagtaagagtaaaacataaagtcaacagaaatattttttaagattggagaaatagcagttatgccctattcctacatgatgatgggaataatttagtagaaagggaaagagtgatggcagaaagagagagaagaattgctcgaacaaggtctgggtaagctaggaggaacagattaagcagaggagctcctagctgcgtgggcttagtaacaggagggagggcagaatctgcaggtgcagatgaaggcaggttgggagctgtgatggggagtgaacgtgtggaagttctcttccgatgattcagtcttctcagtgaatagaaagcaaattattcagctgagagtgaggctcagaaaggaggtattagagagttaagaagaaaaaggaaggcattaaatcatcaactaagaactgaagactgaattatagggagtacagaaaggccgacaggccacatgagatgtgcacctgagtttcccatgagaaagtggggatgaacatttgaaggtttactctgtccggggattatgtgacagtctttcatgccttctcttacttagccatcagtaccactttgaaaggtgggtgttctcccaagataatatcaagatgaagaaataatatccaagaaaaccttgggcaaggtctcagggtcaatcattggcaaaggtggaatgcaagctcatgtctgagtttaaactgctttctcctacataatctagaaaataaagataccagccaggagtggtggctcacgtctgtaaacccagcactttgggaggccaaggcaggcagatcacgagttcaggagatcgagaacatcttggccaacatggtgaaaccccgtctctactaaaaatacaaaaattagctgggtttgatggcacgtgcctgtaatcccagctactcgggaggctgaggcaggagaattgcttgaaccagggagttggaggttgcagtgagctgagatcacgccactgcactccagcctgctgacagagcgagactccatctcaaaataaaataaaataaaaaatataccacctctgtcctcttggaacttattttaataagataaataagacccataaatatcataggtaataatacataccataaacaaggtatagaaaatctgtgatggcagttgaggaagaaaaggtaacctgctgctggtgagtcctgacagggggaccatactagtgacctctaaatccaaaccagttgaggtacagagtacacctagctcataaatatttgttgaatgagtttatgaatgagaaagattagtactttcatttctcatttagtttaattcatgtttatatgaatgtatataaaatgtagttatttgttccagagcatgttatatgaagaaaggcctttcaatagaatgatatcttctaatagacttgatgctttgttggttataccagctgtaactggtatgtaaagagaatgttagcattatttaaacttcgagttgcaccgctgctattcatgctgcctcctaaacagaaatgatctatttcagtgtgcctcattgcttggaattcagcggaatattgattagaaagaaactgctctaatatcagcaagtctctttatatggcctcaagatcaatgaaatgatgtcataagcgatcacttcctatatgcacttattctcaagaagaacatctttatggtaaagatgggagcccagtttcactgccatatactcttcaaggactttctgaagcctcacttatgagatgcctgaagccaggccatggctataaacaattacatggctctaaaaagttttgccctttttaaggaaggcactaaaaagagctgtcctggtatctagacccatcttctttttgaaatcagcatactcaatgttactatctgcttttggttataatgtgtttttaattatctaaagtatgaagcattttctggggttatgatggccttacctttattaggaagtatggttttattttgatagtagcttcctcctctggtggtgttaatcatttcatttttacccttacttggtttgagtttctctcacattactgtatatactttgcctttccataatcactcagtgattgcaatttgcacaagtttttttaaattatgggaatcaagatttaatcctagagatttggtgtacaattcaggctttggatgtttctttagcagttttgtgataagttctagttgcttgtaaaatttcacttaataatgtgtacattagtcattcaataaattgtaattgtaaagaaaacatacaacacttgccttattttgttttttttttggagtcaatgaactcttcgataacagagagtcttagggctttaaagtccacgatttaacagttattcattcaggatcccatcacttggtcgttttagccaaacttttaacccacaaattcaatttcctcaccctcaagactttctcttatatttgtccagccaataccttctccggctcactcatcctctcccaccacacccttgatatagatatagctgttaattttctctgttccaacatttaaactattgagaaaataaaaccttgctcactggtgaccacaaatttactctgtaccttcccctagactaggtatgctgttcagcatctgttttttttctgttttttaaaattgtgattaaaaacacataaaatttaccatcttcaccatttttaagggtacagttcggtagagttaggtacattcacattgttgtagagcagatctccacaactctttttctcttataaaaccaagattctatatccattatatagtaactccacattcccccatcccttcagtccctggcaaccaccattctgttttctgtcgcaatgaatttgactactctcagtacctcatataagtggaatcatacagtacctgtccttttgtgacttatttcacttagcataatgtcctcaaggttcattaatgttgtagcacgtgtcagaatttctttcctttttaaggaaaggaagaaattcattgtgtgtatatgcaattttgtttacattttgtttatccatttatctgtcgatagacattaggttgtgtattagtctgttcttacattgcaatatagaaatacctgagactgagtactttataaagaaaagagttttaattggctcatggttccgcagactgtatgagaagcatgatactggcatctgctcagcttctggggaggcccccaggaaactgacaattatggcagaagatgaagagggaagccaggcatgttttacatggcagaagcaggatcaagggagagaatggggaggtgccacacactagaacaacaccaaggggatggtgctaaaccattcatgaaggatccaccctcatgatccaatcacctcctaccaggtcccacctccaacaactgaggattacaattcgacatgagatttggatgggaacacagcgtttttctgagccctccatatttttccaacctctgcctgttacccaattccaaagttgctgccgcattttcaggtatctttatagcaatgacccactcctgggtaccaattttctgtattagtttcttcccacattgctataaagaaatacctgagactggataatgtataaacaaaagaggtttaattggcttatggttccagggtctgtacaggaagcatgctgctgacttcttcctgccttctggggaggccttgggaaactcacaaccatggaggaaggcaaaggggaagcaagacatctcatacggtgggagcaggaggaagagagagagggggcaggtgctacacacttttaaactactagatttggtgagaactcactccctacatggtaccaagctaatccattcatgagaaatccaccttcatgatccaatcacctcctagtaggcccctctccaacactggagattacaatttgacataatatttggatccaaaccatatcaggttgtttccatctctttactattgtgaatagtgcttccatgagcatgggtgtgcagatgtcttttcagacattgcctcaattcttttggatccatacccagaagtgggatgctcttcagcaccttttattcgtgtacagtcagcaacactttcatttccccacattgtctgttcactcacctcgagccatctactctattctacattcattcattcttccttctattaagggatgatgaaaacatccgaaggtaattctcttaacttcctctccctccaccttccatcctatctacatccactcacccttaccctcatgtctgtcttccacttttcacagcctatatctttcactcttcatccctttctgtcttttccaggacattgttccttcagttagcccctctctcatcattggctccttcgttccacctccaaaactcctgaagccaagacctgctgagctgcatgtgacagaaatccacctcacactggcttagaccaaaaatgaattttgctaaatcacatgacagaaaagtccaagcatgtagctggcttttgtcaaaacaggaatagtcaaagggtgccttcaggaatatcttctccttctgctttgcctggctggcttcattctctggaaaaaactccctaaaaactggcaaaatatttactgatgatgcaacatgcacgtctcatcagcttagccttccagtacaaagagcctctcgtccaataagtctttcaaaagtcccttcaatagctttcattctccaaatagggttacatgcccccaaaggaaacaataactaggagcaggacagtgaaataaacacagggcaaggcctgagttgcctgcccagccttggagatgggggtagggttggtctacctcattggttctcaggtgggatgattttgccctcccaaggacatttggcagtgtctagagacatttttggttactacaactgaaggacggaagggtttccagcctctagtaggtagaggccagggatactgccaaacatcctccaaggcaaaagacagccctccagaacaaagaattatctggtccacgatgtcaataatattgaggtcgagaaaccatagtcttccagaatcacattgaactatgggaaagaggggatttcccagtggaaaaatctaggggcaaatcccagaggaagggacccatttagagcaacagatatccaccttcacctccatctgaaaaaaatcttcccccaaaccatctatgtttctcgtttaaactacctctcttacaccaaattttctgaaagagtggttggccttagctgtctcaaccactgtagtcattcattcaagtgatgataattatggagctccttctgtgtgctaagcattattttaggtcatgggatttggcagtcgtaaactgacatgttctcatgcagcttttattctggtgggagagacacacaataagcagattttcagttggtaataaaatgaaaaaatgataagtataattttttaatctatatgaaacaggcaaaaaggaaaggaagttctgaattaatgtgcaattttaaatagtggccaaggaaggctccattaagaaggtctcatttgagccaaataactcaaggagatgaggtagtagccatgcagagcgatatctgggcaaagagcattctaagcaaaaggaatattaaatgggaggaaaaaactgaagagaaaaatacacctgctgcacttggagaaataatttgtttgcaagctgatggtaaaaatccagcagaaagaggtgtatgatagtgctggaggaagtgagaattgctggtttccttgagtgagtgagagcaaatcgaatctagggcacaagtggagagatcacccttagacttagactgtgaacagtataattatattaacaggagagacggaggtttcatgggccaaatacaagaatttgggtggagtgatggtagaaaattgtagatctatttgattgtttctattttctcaataaagaaagaaacaaagccattcacagaaattaagaatgttggagaaggtgtcagaaataaatgtcaaaataaaaatatgaaatagtcatttaggagaatgggagaataaatggattagacaaacaatagtgggaatgtcaggcagaagtataatggtccatttgaaattatttgttactaaagtaaggctagtcattgtggctatgtgtcttttccagccacattcagtttcacaggtatgacagcaaaataatggagaattgattctaaccagtaatgttgttttgtctaatggctataataacccaagagaagggtgagggagctaacagtgggtgcaagatggtgattataaagacagagtatggaatttaacctggtagtgatgaaagtgaagacacaaaggaggtgagaagctgagagagatagcggtaggatcaatgggctgcaggcactgagacagacaaagattgctggattcagtttaacgttactagggtaaaagaaaagagttggattggtggttagagagtgggatcattgaaatcactgagaggttgaaagtgacaagtctccgagcatgcacatgagcattagagtcagaggagagtggaggacaagaccacaggcagagaagaggtcaaggcactggaaggccagggatttgaaaatactattgctgtgaatgttgaaatcaccaggaactgtggcagaagtaacagtggagaaggtggccatgagccaggagctcaaactttcaaggaatgagggagaaagtagatactaggagatggataccagcagaagtggtaaggagtggcaccttctgatagcatgtgatgtaaaactggggaaatgagccttctcctcttctcttttcctaagcctactacaatctggctgctactcccattactctgttgagaataacttgaaatgatgatagcaaatccttaaaagaatgtcactggatgtactaaaaactgtgataagtgatatgatcaaagtagacatttcttccactagaattttgggaggaagcctaatggaaaccaatgcgcacagaaagacaaatgctgtatgttattagtcatatgtggactctaaaaaactcatctcatagaagtagagggtagaatactggttaccagaggctggggaagggagagacaatgggagatggagagagattggttaaagggcacaggatcacagatagataggaggaatacattcatccttgaatacttaaccctctgccctaaatctgtcagtcctacatccatacttcttatttcagtaagtagcaccaccattcatttctaatcctggggctaactcttttttttttttcttttctgaatcatgtctccttttaatggttaaggaaaacaagtttaacataaaattagcaacaacaacaacaacaacaacaaaatcaaggtttaaagtcaaaattattttaacagaaaaacccaggcaaaatagcctacctacagacaggcagtacatgtcagaaggacaggccacccccaataaaaaagataaaatattattttttctaccttttttaaacttaattatttaattatttctttcttttttcttttttttgtttcttttttttattatactttaagttttagggtacatgtgcacaacgtgcaggtttgttacatatgtatacatgtgcgacgttggtgtgctgcacccattaactcgtcctttacattaggtatatctcctaatgctatccctcccccctccccccaccccacaacaggccccggtgtgtgatgttcctcttcctgtgtccatgtgttctcattgtggaagctggaaaccatcattctcagcaaactaccgcaagggggctaactcttgattgctttcttctcaccaccaaccttaagaaaggaagtaaccaaaatccaatacatgagcaactgttcattccatctccaatatctttgttaattgtccactttatccacccagtcagggccgccatcaaacctcacttggatgtcggcaaaagctcccctgactggtcttcgcagtccattattgccctattctaatctaccttccatactatacacagatttacattttttaaatgtgtatctaattgtccctcccttttaaaaaatcttacaatggcatgacgtctcaattcagggtaaggaaattgtttcttcacattccctgtacaccgtacacatcgcctgcaattgcccttcaacacggagagcaggcatttcattagctgaccttcccacacacattcttgcaaagaggaaaagttaagcagggtgtttggaggcgagctgccatcatccaccgcctttgtctggaagcgcagggcctcacacgcgggatccatcggaagcccgagcattgtcaagctctgctgctgcacctgggtcagcaaggtgggctctgccagcgaaactcgttagaaacaatgcaaatggggagtaaacatgacctcgcccatgaaggggaagctgtggtcaaaagcattttgtcccggaaccccgcagccctccccacactctgggcgcggagcacaatgattggtcactcctattttcgctgagcttttcctcttatttcagttttcttcgagatcaaatctggtttgtagatgtgcttggggagaatgggggcctcttctccaagaagcccggagcctgtcgggccgccggcgcccggtctccccttctgctgcggaggatccctgctggcggttgtggtgctgcttgcgctgccggtggcctggggtgagaggcgggcgggcgtggggaggcgcccgggcggacgaggaacccggggccccgcagagaactcgcgtgcagcgctgagctgcgctgctctgcgcgcccgggtccgaaggcagcgcgatgggtgggctgagcgcgcgacccggcagggcggcgggtgtaggatccttctgcgcactggagaccctcggtgcttctgggtaagcgtggagttcccaggtgcaggggcttaagtcgtgacgagcgcagtggaaggcgcagatgctgagcgggtgccgcacgaaattccttgcctttgtgtattcacagcctcggctggctatagccaagacgtggcgttgatcctagtgaaagggaacttggggatccgacaaacctgagttctggtcctagaaacttaactgtgaggcaacttagcacacctgagtctgtttgctcttctgtaaaatggggacactggtatctctgcatcgtggagttgctgcctcagtggcattaagcctgtcgagtatctaacacagggctatgtgtccccgagtccatttctatcccccaaccgttacctctgtacttagctcccaatggtgtttagacaagcagtcctagggatgcaggtgttacctgacaactgccccgcatggaactgtcctcgccccccacaccaagccaccacggccatcatcaccatgcacttaattgacagcatactttaagacagatgcatgccaggcacttgcggattagaagagcaagggaagccccagaacatgcaatgtaaccgttgcaggtagaagggacagtagatatgtttacagttcgcattttagtgatgtgtttagtacaaaataacgcctattataattattatggaaattttgaggccacatctcttcctttttcttaacttcaaataggtaaacatcttcagttagaacccttctattattatttttcggctccccagaagtcttcttggttgcctagactcactggcaacatctcatttgaagtgacagtcttggttgtttttgtccagcctattcctgacaactccgggttcgcccttctctgccactagacattttacattcattatttgagtgttccttcttctctaaaagagtaaataaaataaaataaagtagaaccaagtcccgcaagagttgttattaatatttgatctccttaggcaccagaaagtaacctgtcaggtgcagagatgtgataaaacgtacaatcttatttttaggagagaagcatgcccagtaagttaagcaatctgttgtcaacgcttaggaatttgtgtcatctttgggagtactggccctcttcttactagaatgttgttttacttagcctatgttgattaagttactgttataaacaatcccagacactattaattgcaaaaaaaaaatttactgaggttatcacaataacttccaaatgtgaaacagcctaaactaaactacctagaaattttgttgctgacataatttaaattttaaaatgctgatggatgcttccagtgtgcatggtcctttggaattttaaagaagtataagagctctgcacccaaagtgtatgcatatagaagtaggtggtggagttttatgaaatctacttattaggaagccagcgttctgctttttccagcctctgctacttaccagctggtgtcttggacccagtaagttaagtcacatcactgaccttcagtgtccacatgtataaaatgagcataactgacatcctgatctctgagagagacgttttgaaaatcagatggtgtaatgcatgtgacagtgttttgtaatctgaaaacccccatgcatgtctgaaaaaccatgactaagaagtcgtgcaagactgcaggatcaccgaaaagcgagaaatctcaactcctatgatcaggaaaggatgagtgaaaggtatatggctttactagcacttaaagagtgaatctagaaacagattgcatacgacaaaaaatagcagaggagctaggattgttttgttattatgagttactcacagtacccgtaaagtggtatagtgctatttgaaagaggacttagattagctgcaaatagatattgcaaatgtaggacaacccctgaaaaatgtgaaaaaaagaactataatttatatgttaataagtaagagagaattgcatcatataaaatgctcagttaaaacaataaagatggctggggacagtggctcatgcccataatcccagcactttgggaggctgaggtgggtggatcacctcaagtcaggagttcaagaccagcctggccaacatagtgaaaccctgtctctacaaaaacacaaaaattaccagggcatgatggtgggtgcctgtagtcccagctactcgggaggctgaggcatgagaatcgcttgaacctgggaggcggaggttgcagtgagtcgagatcgtgccattgcactccagcctgggtgacagagcgcaactccaaatcaaaaaaaaaaaaaaaaaaaaaaaaaaagaaacaaacaaacaaaacaaaaaacaataaagggcaggaaaagaatggaagacaaaaaatagaaacagagaacaagagaaaaaaagcaacaaataaaaaccagtaacaaaactaaagcaactatatcaacaatcattttgagtgtcaatgatcgaaatgcaccatttgaaacagatcatcagagtggatcaagaaacaagacccaactatatactgtgtacaacaagaccgttttaaatatagacaatatatatgaaaagtaaatggataaagatataccatgctaatgctagtcacagaaagcaggaatagctgtgttaatttcaaacacagcagacttcagaccaagaaaaattattagggataaagagggacatcatataatgataaaggggccaattatccaagaagacgtaacaatatcccatatgtatgcacctgatggagagacaaaatacgtgaggcaaaacccatagaactgcaaggagaaatagatggatttactatcatagttggagacttctatgatatctttctgatatcagaaaaggtgctgaagtctccttatcagaaatgggcagattcagcaggcagaaaatccgtaaggacatacttgaattcaacagcaccatcaatccacttgggtataattgacatatatagatgacttcatccacaacagcagagcacatattctcccgcttacattcatggggatagaccacattctgagccataaaatagtacacgaattaagctttaccaggcagtgtttaatatagggtggactctggcgccctcacgtggtcctcatataggatctggtttggttatccctgctaggttaaggtgcaagatagaagggaagttccaatttgctttctgtgctttgtggtgtattttggtttacatatgctcagatgagtggatgtgtgatttatattatctattttaatctaaaataagcttcacatttggacaggtaacatcaaaagtgtcctacacagaaatgctgggtgaagatcccagtaataaaaccaactccagaaaacaagaaaatggtagagttgacaatccctctcaccctctccgcaaagacacatgtatacacattttttgtcagaggcattaagtagaagaaatgctgtcagtctaatcacaactgatcacaactcgatgaaaccaaaaaacctagaaagtatcatgaagactgtcgaaataagctttacattcactattgtgaacagagagactcaatgtgactgttttttgtcccgttagatgttagctaatgattgtgctaagtcatgatgattaacaaagcatttaaaatatttattttatctgtgttacatttcaaaaatttatattgaggcatataatttatgttcgcgtacatatataatttataaatttatatatttgaaagggcatgctctttttttaaactgatagaggtgcctaagcaaagcaagtgcaaatctattccttaaagggtaagtatgcagaatggaaagcagagtgttctttgggttgacagctcatattgcaacagacatgaaagtgatgatgtgttaattgtgcatatagcacagaatacatcaacttgctttgaatggaatatctgaaccaggagaatgtgaaagtgggctgagtcatacaagacaaaacccgaaatgagataacaatacatacccactagaatggctaaaatgaaaaagattgaccgagccaagtgttggcgataaggtggagtaactggaattataatatactgctatttggcaggtaaaattataacattaactttagaaaatagttcaacagattcttaaaaccttagacacacactcaacattttactcttaggtttttacccaagagaaatgaaatcatatgtccacacaaagacttgtacatgaattttcatagcagttttgtttgtaatagccaacacgtggaaacaatccaaatgtccctcaacaagtaaatggataaactaaattaagatatatttatgcaattgaatattacccagcaactaaaggaaacaatttgtatacatgcagcaacctagatggatctctaattatgctgtgtgaaggctaaaccataaaaaaaaacctgagtgatttcctttatacaataggatataaatgaagtgatttaggttatatgaaattttagaaagtcaaatcaatctgtagtaagagaaaaccacctgagttatttcctttatatgataggatataaacgaagtgattcgggttatatgaaattttagaaagtcagatcaatctgtagtaagagaaaacacattgaaggttgcctagagaaggaagtggatgtttggatggattacagaagggcatgagggaactctgtgtgggtgggatgtatgatggaaacgtttattgtcttcattttggtgatggtttcacaacgcatacatatgttataagtaatcgaattgtacacttcaaatactcatcaatcattgtatgtaatatatcttgataaagctataaaaacttttaaaattatggtaggtcttcagtttgtggattttatattaatatatttgtcataggaactagtcacaattgagggattggtaataaaggagagaaaggaaactacatcaagctttctttgttgaaggctcatatattccttttttgagctattatacaactttgctttttataattacctatactattcatatactactatgcaggtaagaatattatgtaattaaggggaaggaacttctttccaagaatggttcattcaatttgctttgttactttaggtctcattccttcctctcgttgcaagctttgctgtgacatttaccctctctcaatacagcttttggcgctaggcacttcacatggaatctcttcctttgtccggcatcaatggataagacaaatatcaaaattgtatttcatcccacatatcaactagaggaaaggtgaatgcataacactgaaaataacagcaactgttttactcagtgttttttttttttacagtatcctcaaagtgctgttatctatcaaaatcagctgtgaaaatttttaaaaatagactcctgggccctaacctagacccactaaatcagagatttgggggacatagcttggattcttgatttttttgagttttataagtaattcttcattttttgttcattgcaacaaatatgcattgagttcttataattgagtgttaagcaccaggactaagtattaatttagaggtacaaaaaaacacatcatctcttgcctttaaattatgcatatctaatatctattgagagaaatagatacttctaaaagcacacaaagataaaaagcacaaattgtaataacaaacaattattgatatgaaaggaaaagcaaagtgtcggactagaaattattatagggtggggcagagggaagtagtttagattccaaatccctaagagggtcagggaaggcttcagatgagattgggtgtgttcagggtggtatggccataggcaggctggggaaggcttctataagaaagtgacattttagcagatgcctgaaggaagaattgaagtcagagtgaagataaaattgcgtcacatagaaggaatgtcatagacgggaaaaatgtgtgtctttgggaaactgaaaaaggggaaagggccacaccttggtgaggggaccaagtggcacaagatgaggcagggaacatagacaagggcttccttgcttaacaactgctggcttaataaagcaaatgtgtgatgatggatacaggctgtctgggaaaaataagtaagaaatatgagctttcttggagcatcatcctttgcttcagtagaaagcacagagttaggcttccaattctgactaaagccattgacaacagggaaaaggcaaccttaggaattctcctctctgtccggggtcccgtgggcactatgatggagctcatgagatgcagatgagaagtcccaggctgaatccggggcacattcactcaggagagctgaggtcaccagtcactgaggtcatccagtgcattcccgacagcataggctcattccaagctagttctgcaaaggagcagaaaatgaactcttggaagcaaagcaagcactcccactttagcggaataatcgaatttaactcttagaagtccccttacccttttctaagggtaataatcgtaagtataatttatgaagtgccttctgtgtatgtggcagcatatactacttttgattctccctgcaaacctggtaggaaaatattattccctttatgaagatgaaactgaggctcagcaagattaagcggtttgcctaagacctcatagccattaagtagaagacattgggttcaagattcaatctatgaacccaacatttttaatactatataccattctctttttgtattaatttcctattgctgctgtaacaaatttccacaaacttagtggcttaagacaacagaaatgtattctcttccagttctggaggccgacgtctaaaatagatccatagggctgtgttccttgtggaggctccaggggagcaggggttttcttgctctttccagcttccaggggctgcttccgtcctttggctcttggcctccttcctctaccttccaaaccagcaccatagtgtctctgaatatccttcttctgtctcctttcaccctcttgcctcccttttataaggacccttgtgatcacatttaaggtccacctagataacccaggataatctgcccatctcaagattcttaatcacatctgcaaagccctttaaccattacaggtaacaatcacaggcttcagggatcagaacatggatatctctgagaggtccttacttagcctaccacacctttccatatagattctcaaaattttagctgagcctaataagggagttcattaccattagggtccggtttagtagcaagtgcttcctttaagtgaaaaggtgaaagttgtccacttaataaggaaagaaaaacattgtatgttgaagttgctaagacctaaggtaagaaggaatcttctatcgatgaaattgtgaagaaggaaaaataaatttgtgctagttttgctgtcacacttcaaactgcaaaagttacaaccacagtgcatgctaagtgcttagctaagaggggaaaggcattaaatttgtgggcggaagaggtgaacagaaatgtgttctaattgacagctgtcaggtttggtactatctgaggttttgggtatcggctaatgtcttggaacatgtcccccaaagataagtgggtgactactgtatattcaaaataagcatttatatactggggagtaaatctcccatgttatttgtgttttatttgtcccacaaataaagtaaacaaagtagaattttaggcaagattcatttctagaggcagagatattttattataataaagaaggttgctctaccataaaatatagcaatttaaatttttataatcctaataacctcaaaatatataaaataaaagatggacaacattataaaaagaaatagacaaatgtacaataaataaaatattttaacacaactcatttagtatctagtaagacaagtactccccccaaaatcagtaaagtatctagaagatttgaataaatattaacagattggattcactgaccttgttacaagaaagaattatacatgatgataggagagaggaagccacagcacaggcacttactgattaactaaattttgaagctgtgaaatgcaccttatcctttagtgaaagatgatataaatagcttagttgccttcaaactggcagagactttttgaatggatggatgctgattttttaaaaaggagcccatttctgaggcatcttttaaagcaggggtcctcaacccctgggccatagactgatactgtccagtggcctgttaggaaatgggcagaacagtaggaggtgagcagccaagcattactgcctgagctccacctcctgtcagattagtggcagcattagattctcataggagcagaaaccctattgtgaactgtgcatatgagggatctaggttgcatgctccctatgagaatctaatgactgatgatctgagtggaacagttccatctcaaaaccatttccctgcaccctccattcacggaaaaattgtcttccacaaaaccagtcccaggtgctaaaaagggactactgttgtaaaggaataagtccctttgctattattatttttattaagatggaatcttgctctgtcacccaggctggagtgcagtggcacagtcttggctcactgcaacatctgcctcctgggttcaagcaattctcctgcctcagcctcccaagtagctgtgcacaggcatgtgtacaggcaagtgcaatcatgctctgctaactttttgtattttgggagaggcagtgtttcaccatgttggccagcctggtctcaaactcctgacctcaagtgatccacccaccttggcctctgaaagtgctgaaattacaggcatgagccaccactcctgcaccccttggctattattgaagtgttctttttcttttttgatcacatctatgaagtatattggagagaaagagaaggtagaatgggaatttcaacagggtcacggtggctcactcctgtaatcccaacactttgggaggccaaagtgggtagatgacctgaggtcaggagtcgagaccagcctggccaacatggtaaaaccccatctctactaaaaatacgaaaattagccaggtgtggtggtgggcacctgtaatcccagctactcaggaagctgaggtaaggacaattgcttgaacccaagaggcggaggttgcagtgagccaagatagcgccactgcactccagcctgggtgatggagccagtctccgtctcaaaaaagaaaaaaaaaagtatggtaatttctccattaactttgatgcttctatggtcttgatctccaggtcaatgcaatgccccagaatggcttccatttgccaggcctaccaacctaactgatgagtttgagtttcccattgggacatatctgaactatgaatgccgccctggttattccggaagaccgttttctatcatctgcctaaaaaactcagtctggactggtgctaaggacaggtgcagacgtaagtaactctggagtgggaacccccctgttagtcaaacatctgtaagatctgattcaatttgttcaaattttgtaactgagttgcatatgacaattagtttgccaaggtgcaatacatatgagaattattcttgtagatcataccttgttactgctttgagttcctggcgccttcattaaaagtttatttcatgagaaacagtcattgcaggacatgattgagggaaaatccccattcactgggggtctcccattttcatgactaaaattaagtaatgaatgacttgggacaagaaagagaagtggattaaataactaaaagatgtgacaatcttgggctttgagatctttggattataccagttgaattgaattacagataataacaaagtttacatttttctgggaggcataatatggggatgaaacagatctgaaaggaaagttttttttgaaagggagctgatcctgaggcagtctggtgagtttcctcaaggtagcaaaatctgtggaaccatcagaactgcgtgtgttcctcagtaagctacaggcaggttgagaccttatgtactaaaaaaagtttttagtttactctacttggctccaaaattctgtttctttcctgtaggtaaatcatgtcgtaatcctccagatcctgtgaatggcatggtgcatgtgatcaaaggcatccagttcggatcccaaattaaatattcttgtactaaagggtgagttggcatctcttgaaccaacatctcttggttcaagagttctaacacagccttactaccttctagtcacatgtcagaaaggacaactaaactattaccatctgctctttaacggcttcaacacagatgtttagctcctgactgaaatgagcaaaggtatgacaagatcgggggaaaatcatctgtatccttgctggaaaccaaggcagagcatatatgaaaagtgtggcattcattgggtgggaaggaagaaaatgggggaagagtatagtcaaagcacacaaacagccttaacgcagaggggacattgctggaagaaagggaaggccattgagtaactgtgtgagagaaatcttaacggtcatagcacaagtagtttgctagggctgctgtaacagagtactccaaaacgggtggcttaacacaaatgaagtttttaaaattctgttccggaggctgaaagtgcaaaatcaaggtgttggcagagccatgctcccctctaaaacctgtaaggatggatccttctttgcttcttccagcttctggagccccaggccttccttggcgtgtggcagcagaactcccgtttctgtctctgtcctcacatggccgtcttccctctgggtctgtgtcctcacatgctgttttcctgtctgtgtatggctgtgtcgaaagtgctctcttttaataaggacaccaatcataatggattagcgcccacactaacgacctcatcttaactggattgcctctccaaagaccatatttccaaataagatcacattaataagcactggggattaagacatcaatatatttcggggtaagggggacacaattctcattcattgctggtaggaatgcaaaatggtaccatgacttggaaagataatttggcagttttttataaaactaaacatactcttaccatgttatccagcagttatccttcttggcatttatccaaaggaattgaaaactcatgttcacaccaaaaaaaaaagaaatctgcacacagatgtttataacagctttattcataattgccaaaacttggaagcaatcaagatgtcctttagcaagggaatggataaactgtggtacatccatacaatagaatattattcaataccaaaaagaaatgagctatcaagccatgaagagacatagaggaaccttaaatagtgaaccttttttcaccatcactaagtgaaagaagccaatctgaaaaggctacataacatatgattccaactatatgccattctggaaaaggcaaaactatggagacagtgaaaatatcagtggttgtcaggggttagggaagaaggggatgaatcggaagagcacagaggattttgagggtagtgaaactactctgtatgatgccataacagtaggtacatgtcataataaatttatccgaagtcatatagtgtacaataccaagagtggaccctaacataaactatggacttggggtggccatgatgtgtcagtgtaggttcctcaattgcgaaaaacgtaccaccctggtgaaagatgtttataataggggaggttatccatgtataggggcagggagtacataggaaatctctgtatcttctgttcattattgctgtgaaccaaaaactgtgctaaaacacaaagtctattttttaaaactgcatagacataaatacatgggcatatgtgcataaacagacacgcacacaaataagtgcaggtaaaacaggaaatttgaacaaaatctgtggattataactgtttcaatatcttaatgttgatgttgcactattgttttgcaaaatgttattattaggggaaaattgagtaaatagtacctgggatctctctgtactattccctgcatgtgaatctgattatctcaaagtaaaaagttttttttttttttaaagttcctactaaatttccaaggggatgggcttcccctcagatcactaccccttttcagggagcaataaagtaatcttccttggaatgtagcaatctgtaaccaatcaaaatgctgtaactatgcatggtcccatatggaaaatataatcctgctaaaatttctctgtctctgcctatgtaagtgataccttatgtcctccactttggagtgctgaccccattcatttggagttggtctcttccaggtggctacccttaacctttgtgctcaaataaactctatccttaaatatattttctgaatctcattatttaaggttgaaaatgtgctaacctaaataattcacaggatttgttttttattctcattttttcctaacctatccacctggttcaaggcacatagattaagaaggaaaatggaaatgggactaatatcccaggcttcactgtccctcttcggggccctggggaggagactcccaaaagtctagacatgttcacccacatcctgtatgtggtttctggaaacgaaatgatcatggcttttcctgaaccatggcttaactttgtgaatccacaactctctcttccccaggagatccaaaaaggtagggtaggatgtaaaggcttcaatctgttcaagtggatatgagactccctggctccccttacaataagtagcatggattttgtctctctgccttacttcctccaaacattctgaatgagaagtgttcaaaccactatttgttcaattgcttaatctactttgggacacaagtttaataaattaaaatattcttctatctgttccccttgatcagtgaacataaagttatcttttgactcatatttaaaatgttcagtattacaacactgaacaatagtatggaggaaaaaaaatgccaacttaagtttgaacttgcttcaccattcctatcccaacccccatgattagaaaatcaaaaagaacactttgagaaataacctcagtggggtcaaaagccagaggagcctccaggatcccttgttcctaagacaaacaggcaggaggaggtgcacatataggattgcagctgttcttcacttcatttgttcacatacttcatacttgtgtttatgtctgttggcagtgcaatagaaaatgatttcatttttggtggtatactagaaggcattaaaaaacaaaataaggccgggtgtgctggctgtaatcccagcactttgggaggctgaggtgggtggattacctgaagtcaggaattcaagaccagcctggtcaatgtggtgaagcctgtttctactaaaaatgcaaaaatcagccgagtgtggtggcaggcacctgtagtcccagcagctaaggaggctgaggcaggagaatctcttgaatccgggaggtggaggttgcagtgagccaagatcgcaccattgcactccagccttggcgacaagagtgaaaatctgtctcaaaaaaaaagaacaacaacaacagcaacaacaaaaatcccaaatgatattgaagtcattaataattacatcataatcactagtataatgtaatagtgcatcaagtatcttcaaaagcacccactgttctctcactatttatttgatcttcatttgtcactgttttgttgtttgaataaagctttatgttgccaggttttcttacatactcataaagcaaagttctcagctataccaataaccatgactgttatttgacattgcttcattccttcatgtatagtactatcaagtttgaccctaccctcactatgactagtttcacccaaccatctatcacaacagagagtctaacgtgaagtaaaataaatgtcataaattattccaaatttatggcacactgtgaacagtttgagacatactaattgagaattgctgactttagtattttaagtataaaatgagtgttcaattctttttgatcagcctggatttcctttggttctagttatgtatccccttccttccttccttccttcctttccttccttccttccttcctccctcccttccttcctttccttctttccttctttgctttctttctttcctttttactttcttttttttttttgatacaaggtcttgctttgttgcccaggctggagtgcagtggcatgatcagcactcactgcagcctcaacctccctgactcaagcgatcttcatgcctcagcctcctgagtagctaggactacaggaatgtgccaccacgcctggcttttttataaattttttgtacagacagcgtctcactatattgcccaggctggtctcgaactcctgagctcaagcaatcctcttgcctcagccccccaaagtgctggaattacaggggtgagccactgtgaagggcctaatttggccttctttaatgaatcttattgataaaagcccatccatgcatccgtgcatccatacttttaaggcaaagaaatacatacaacaggactgtatacacacatatacatgtatatatatgacagcttccctgcactcaagaactttgtgctatcttttaaaaaatgaaatttataggaaaaactacaattcatcttagatttgcataaaaaagtgtcataaggtaataaagaagagaaagctcatccaattgagaatgtatgaaaaagaaagtcaaaaagtcccaagaagaatgtgaaacttgggaaagtgatagatagtcctttgatgagtgtaaaaagtccctctgaatcctataagagtgtaatctctggaagtagtaatttaattgggtagttgacctgtgtctttagaatgtaacattccttattttttgcctctagataccgactcattggttcctcgtctgccacatgcatcatctcaggtgatactgtcatttgggataatgaaacacctatttgtgacagtgagttgaaatatcccttcctatttcttttaccgacacattctaatttttctctggaataataaaaatcttaactgaattccttctgtgcaatctgtccttcacacggctgaagactgcggtaatgttctcgaatattcctatggggttcctggcaactctttctttaagttcttccttatcctgggatgtgtcttttctaattccagaagtttaaatacataaaagccttcaaacttgattttacttcaataaacgtgaaattatgttgtttctaccacctccagtataataatcatcttgcttggcaaatcagtaaagatttttaaaattgatactcttcaaggttagcgaagctgtggaagaacctggactctcatgtaccacgagatcaacacatcctcttgaaaggccccatgcactataaacctcagaagtgaacatatattttaacctacttcttaaaatttatacttaggaaataatcacacactttttaaagtagtttggtataaacttttcattgcagcattatttatattagttaaaatgttagagtaacctaaatattttaaactatggtttggaaataatctactagtaggaaaaagatgtgttcaaatgaccattataaagaattccctaagaaacataaaacagctatgcagaatgaaaataagtatatccatacactggcatggtattcagccataaaaaatgacagcataaagaagcacttaatgactagaaagagatgtattttacgtggaaaaagaatcagatgaacggcatatatggcaagatctcactttattaaaaaataatacacctatgtagtgagggccaggctgaggctgagagaaatacagtgtataacatctttgtcttactcttctctttggataactggactcctttacttttcttcttggtatttaaaaatgttacttttactagaaagtttacgagcttcagaatctaagtttacaaatgacattggtcacacatttattgctgtttatccactttaagaaacagttttgctattttgtaaaacaaattgggaaaccttccatcttatttgaaatctgtaataaacatggaattggaataggaattttcctggaaatatgaaaaagattagtaaaatagagaaaacaaaaaatataataatacacctatacctgtatttattttttatctctgtttctacttctgtaacctctctgtatccaaatcctggtaaatggcctcaagtcttcttggaaaaggctaggggaagatttacaatacatgcttttgattgtgtagcatggtgcttcctcaagagaatccagtctcccatccgttggtgctgctctgggtctataaactattcaagtctaggaattgttgatgaacaatgaacttcttttgcaataattcaagtcagacttctattcacttgacctaaaactcttacacttatacaaatcaagtaacactttagtcggctatccgtctactttggttttagagactccatgatcaattagcccaataacaatgtcctcttcaatcaaatcattctgattgctgtttcagctcaaatatgcattacaagaacccccattgtctctggcaattaagtgctgccactgggactctgccaccctgaggtcctttggtccccaagtgaattcagagaatccagttcaatggcaacagttcccattgtcattcctggcctacagagaatgaaccgttgcagaggatgctgaaactccccatgtgaatgtatttctcaagcctctggtaaaaggtctgtcttctgaaccctctactcctgcactgtgcctcaccagctctatccaaggatacaactttcagagtggaatggctgttgcttaacttctgcctctcaaatatcaggctaatttctcatgctataaccctagtccagaaccgtacagagaaagtaagtctggaaaacttaattccaaattggcctggttgacatggtgccaaaccaccaaataattataattttatttaactctttgtcttcttttctttctttccttccctccctccctcctttcctccctnnnnnnnnnnnnnnnnnnnntccctccctccctccctccctcccttccttccttccttccttccttccttccttccttccttccttccttccctctttccttattttctttcttctttaccacgctggctaggaccaccagtataacattgaacattggtagcaatagatgtcatccttgtcttgttccacatctcaaagttaaagtttaaaacatttcaccattaagctggtgtttactgtaggcttttggtagataaccatttttgaaataaggaaattatcttatatattcttcattgctaaaaaatttatgtctttgaatcatgttgaagtttatcaaacactttagttacatatattgatgtaatcatatctgtttctctttttctgttaatgcaacaaattgttttgagtacatttttgaaaggcaaatgattttaaatttcaattttacattcttaaaataaatcaactcagtcataatatttaatcatttttatatatggcaaatatgcttttatgatatattttagatgtttctattaaaatataattcatgtatcataaaagttacctttttaaattatacaatttagtggtgtttagtatattcacaaagttgtgtgttatggtctgaacgtttgagtccaccccaaatccatatgttgaaatccttacccctaaagtgatgacattaggaagtgaggcctttgaaagatgattagggcatgagagcagagccatcacgaatgggattagcgtcctaataaaagaggcccggaagagctcctttggccctcccaccatgggaggagatgctgaatctgccagtgttggtcttgaactccccagcctccaaaactacaagaaataaatttctgttgtgtacaagctaaccagtttatagtattttgttatagcagcccaaatagactaagacattgggcaaccagcaccgccaattaattctagaacactttcatcatcccattcctaacatattttagagataagactataattttctttcttgtaatgtccttaataagattttgatatcaaagctatgacagtcttataaagccagctggtagtgtttcatatatttgtttccttgtaagggtttatataagattggcattatttcttctttaaaaataattcaccagaaaaggtatgtggcctggagtttacgttcttgggaagtttttttttttccaaccattttcctgtaccatgtagacttttggctgaagtataacatatatatatatatacacacacacacacacacacacacacacacacatatatacatatatacttatatgtatatatgtatatatacgtatatacgtatgcatacgtgtatgtatatgtgtatatatgtacgtatatatacatacgtacgtatatatacgtgtatacgtatatatacatatacatatataggtatatacatatatatacgtatatatacatatacatatataggtatatacatatatatacgtatatatacatatacatatataggtatatacgtatacgtatacatatataggtatatgtatacatatatacacactatatatatatacacatatatatagtgtgtatatatgcacacatcttaatcatgcagttcaatggagttttacaaagtaaatgtatccatgtaaacgtcactcagattaagatatagaacattatcagcaccccagaagccttcccgatgccctttcccagttatcttcccaaagaaaccactattctgatttataacactaatagttttgttgcttcctaaattttatattaaaggaatcaaaaaatagatactcttttgtgtccagcttcatctcaatgttatatttggaagagtcatttttgtttttgcaggaaggattgttgggtcttctttattattatgttgtatttcattgatgatcttgagtaccttttcacgtttgtgaagtgctattccaaacttttgcctattatttattagtttgtctattgttttgtagaagttctttaaatattctcatgttttctaataaatgtaacacaaatattgtctttcaggctgtggcttttcttttttccttcttaatgatgtcttttgtttatgaaagttctacattttaataatattcaatttatgagtcttcttttttccagttactgctttttctattctacttaagcaattgggccaagtgaggtggctcatgtctataatcccagcattttggaaggccaaggcaggaggattgcttgaagccaggagttcaagaccagcctgggcagcagagtgagaccctgtctctacaaaaaaaataaatatataaaattagctgggctcagtggcacatgcctgtagtcccagctacttgggaggctgaggtgggaggatcccttgagcacagaggttcaaggcttcagtgagttatgatggtgccactgcactccagcctaggtgacaaagccctgtttcttatggatgggcaatagatctaatatcatctattaaaaagactattccttgcatagtgcaatgcgacaccaccatgaccataagtcaggtgaccttatgagtggatctcattccagagaggttctgtttcactggtttatttgccatactataagcactacattaagattttaattactatagcattacattaagatttgatatctggtagcatatatctcctaactatgtgcatcttcaagatttacttggtgattcttggccctttgcattaccatataaaatttagaatcagcttgtcaatttccacataaagaatcctacttgaatttgtattaagtttctgttgactcagtagatcaatttgtggacaagtaacaaatttacagttttgaagtttaaatttatgaatatgatatatcctcccattttgaagtcttctttaatttcttttaataatatttgttaatgtacattatagaagtcatgtacctatttcattatctttattctgacatattatttttaaaatttcattctttaattatttacttcttagatatgcacctgtttcatctcagctccagcaaatttgttaaatttacttataaattgaatagtttatctgtagattcttttgaatttgctgtgtaattatgtcatctatgaatctgacaaagtttttacatcttttcctttcttatgtcttttgtttatttctcttgctttattgcattggctagaacctccagtacaatattgaatagaagacatgatacaaggcttttaatagtcctcataaatcatgatgtatgctgtagatttttgcatgatatcctttattagattaaggaaactcccctttctttctaattactaaaagatttatgaatgttctttctaattgatcactgcatgtattgagattatcatgtttctttttcactctgttaatgtaatatattacattgattgatgtttaaaagacaaacgctgaattcctagaataaacctatgttgcttgtgatgtgttatagatgattatcctatgtatgggggatatgcgtgtgtgtgtgtgcaggattgctcatatttttattgtaacattgtaacattgatttaatatttaaaatcagtcaaggtaaacctcactttgatcattgtatcatcctttggaaatattgctggattcagtttcataatattttgttcagaaaatttgcatttatattctcaagagatcttgggttataatttgcttttattttaatgtccttatcaggtttgggcatcaagattatgttggcctgataaaatgtgttaaaaattatttattttttctagtgtctggaacaatttgtgtaacattatttttccttatatgtttggaagaattcagcagtgaagcaatctggacctgagggtttgttgttgttgttgtcaggatttaatatctttaatagctgtaaaactattattttatatcttattgaattagtttgggtaagttatatttttcaaggaatttactcattttatttagatttcctaggttatcagcataatgctgtttattatagtctcatattagcctttggatgcctgtaagttctgtagtgatacccttacactcattaatttctgatattggtaatttcttttgcttctttttccttgattagttttaccggggctttatcaattttactaagcttttcagaaaaacaacttttaactttcttgttttttctttagtttatgactattttctcttttattgatttctgctttaagctttgtgtattcctccagtcctaaattcttgatactaattaatttgtttccaacctttatttttctaatatgtacatttaacctatcaatttttctctaaaactgttttatttatttccaacaatctttatatttttattatcattgtacataaaagctttctaatttcacttttaatatctcctctgacccataggctgtttagaagggcattgcttaatttctaaatatttagagatcttctagttatcattctttcattaatttaatcatttgagacatggtttattgcccagaatatggacgattttggtaaaatgttacatatgcacttgaatgtacagttattttgcttcattttctagaaatgtcatttaggaaaatgtggtttagaacagtctttttttccccctccacttgttctctcagttatggagaagcatgtgtaaaatatctgtattagtttcccagggctgctgtaacaaattaccacaaacttagtggcttcaaagaagagaaatttactctcttaacagtttggaggccagaaatccagttaagatgtcaataggattggttccatctgcaagctgttctgtgcctctctccaggcttccttccagtggctgctggcaatcgttgatgttccttggcttgtagatgcatcatttccttctctgtctccatcttctcgtcgccttctcctctgtgtgtgtcctttgctcttctgtctcctataaagacactggacatggatttagaggccaccctggcaatccagaatggtcacagctcgagatcattaacgtgattgtatctacaaagactctccaaactgggtcatattcacaggtttcagagatcaggacacagatattttttaaggaggacagtggttattcaacccattacaatccccaactacaactatgaatttgtctgtctttcctctttgttctagcaatttttactttatgtattttaaacatgttattaaatgcatgaaatttttggtttattctttctgctgaattgactattttatcataatgaaatgtctctctttacctctcataatacttcttaccttaaaatctactttgcatattaatacagctatataagctttctttattgtttttatattatatgtgttttaaatcttttactttcagcccttctttgtcttatatttaaagcttgtctcttataaacatcatatagtaaggttttgttgttttattcagtcttagttgttcattggtgtgtttggaacattaaaatttaataataaaaattaaaaataaataaatttaatatagttactgatataaagtctaagtcttggtatttgtttcatgtgtttgttcctttattcctcatttctcacattttttaattcatcaagtatttttattattctatttccccagtagcttttaagttatattccattttttattcttaaatgactactctagagatagacatccttgatttactatagtctgctaaaattgtacttttaccactctccaaacaacgcaagtaccgaaactattaatagttaattccatttatgtcctccccctctttttgtattgttgccatacgttttgcaaaaagaaaagcttcagctgaattaaatttaaaagagtttaattgagcaatgaacgattcgcaaatcaggcagcctcccgagccaaagtaagcgcagagactccagcccagctgcaatgggggaagaggatttaccgacagaaaaaggaaactgacgtacagaaaacagaagtgaggtacagaaacagccgattggttatagctcagcgtttgccttatttgaaaacagttcaaacagttggccacatttgattggccaaaactcggtgattggcgtaagagtagtctgcggtctgtttacatcttcacttgttatagtttgcagtttacagagaaacctttaggctgagcttaaactacgtaaggctttaggctaaacttgatttaacgatttacatatattctatatttcaaagacactgttgtctttataaaaacagtatttatttatatttacaccttagtgaattcttagaatttttatgttgcctcagcatccatttagaatatgtttagctttctcatgccagaagcagggcttagtcacccttaatgccctttctagttctgtacctcctcccaattttgcaacgtggtcgagccagatatctgccttatacaactgcctcctggtgaccacctctctatgggacagctagataaaacctacttgactagcgtccctgacctctgtgccctgcatggacttcgcagatatgctgccgtgaccacctctcagtcgcagcacgactgcctggaacatgtgcctgctttctttaaactcaccaattagaactccccatgggagataccttggcttgtagatgcaagatgctgggtcatactctggtccccaataaaggcattggctgatgggtccccttctctctctctgtctcctcgcgctgaccaacctctgtgtgatcttcaggcgtgccatacccccagcccgtaataaaatctttactgccatcttgtgtttcttgtaatgactgaagaggttttctctatcataaagatcctaaatgaaaacatacccgcatatgagctctttctggtgtgtttccttcttattgcaattctgtcaattctatatgaaactattttccttcagcctgaaaaagtctctttggcatttttgtattgtagagcttctgacaacaaattctttaaacatttttctaagtgtggttcctctgaaggttattgtccatgtttcctggctgcttttaaaatggattacactttaaaacagattttttacaatattattgtgttgtgtctaggtaagaatttctttgtattgcttgggtttgcacatttttttttttttggttgttttttttttttttttttttttttgacagaatttcactcttatcacctgggctggagtgcagtggtgggatatctcggctcactgcaacctccgcctccggggttcaagttatcctcccacttcagccttccaagtagctgcaattacaggcctgtgcctccatgcctggctaatttttacccttttagtagagatgggttttcaccatgttgaccaggctggtctcaaactcctgacaagaggtgatctgcccacctcggcctcccaaactgctgggattacaggcatgagccaccgtgccaggcctgtatagccttttgaacctgtaatttaatgatgtcttgcatcagtcttggaaaattctcagttattaattcttcaaatgttgtttatgctcagttctctctctcttctcatcgagggacttcagttaaacatgctaggctttattcttctatgtatttagtctgtattttttaatctttttatatattggtgcttggttttgagtattttcttctgtcctagcttccggttcattgattttctttcagagtctaacctgctattaatctcacacaaattcttaatttcagcaatcatattttacttttacaattctagactttttattttccaaatctgccctcttccctttttttttttttttttttttttttgagacagggtctcactttgttgcccaggttggagcacagtagcataatcatagctcactgcagcctcaaccttcacaggctcaagcaattctcccacctcagccacctgagtagctgggaatgcaggtgtgcaccaccacacctacacatctggataatatatatatatatatatgtatatatacttttttttttttgtcgagacagggtttcgccatgttgcccaggctggtctcaaactcctgagctcaaacgatccactctcctcagcctcccatagcgttagaattacaggcgtgagccaccacatcccaccctgttctttttaatagtttctagttcttacaagtttcaattatacccttgaacaggtctgtagttctaatgggtcagtttctgtcatcagtaattgtgtgtgttattttatctctccaaatatctggttatctttgattgtgtatcaggaattctatttgaaaactgtgtctgtagaaataatttcaaggccttagataacccatcttcttccagatggaatttttgtcattgtttctgcaggcatctggggacattagcaatctaggaccactctaattcagtctcaggaactgtgattttccagggccacccacagtaccagtacttgaagtactagttccagtctctgagacagcaaatttattttcagttaaccctgattaccagggcctagttcttgtggcctcagaacacatcagaaggtattaccaggccttccatttggggcaggccctggacttccattgttgtcccttaacttcatgagaaaatcaaaagtctgttcagcctctcagttgccccgtcctgattcagctgcccattcccaaacaataagcagcccagttgccaagcccaaatacccagctctcaactggattctcatcttctcctagatcatggcccaggaatgcttcactagtttgttagctttctgatgctttaacagataaatatttttaattctccagtatttctagcctttcttgagggtggatggttggagcaatattttatttgaactgttgagattactattagtagaagcagagcctgaaaaatttttatttttaattttaattcattcatttctaaatttatccaattaaattcactcagttttaatttcaagtgttttgggatttgggttgaagaaattttgttctagtttatagcaacacagtatactatgtactactgctatactttaaaatgtatttaggggtttttgtggactaatatatgatcacttttacacagatatcatcttatgatatcaaacttagatttgatgaaatgagttggtaagcttcatatcttttatatgttgtgaaaccttgaaattacatttggaagtatatttttgaatgaattttggtaatttgtatttccatttatatcatttagattttcaaaatatttaaccccctgtagtctacagttttataaatattctcatatacataaaaatatgtttaaattctttttcctactgtgtatatttgtgttttctctcatcccttatactttatcttttagcaaatgtttttgtattttatttttctaaaaaagctaaccttggttaataacaaaaatggaaattaagaaagcaaacggaaaagagtaggagaaaactgtataaatactataacactatgatcaaagagctatttaaaatgaaaagaatgtggattgagttaatacatgcatgcaaatactataggaaatcatatcagtaagaaaggcaggacacatcatattatgcccattgaagctacaactttataaaaatgtacctatgtgttagcaaagattaaaagcaaataatgaatgtaaaaatagctatagtttagtgactcatgagatttctgtcattcattatttaaactgactgttatttatcctgctcttcctttttccaggaattccttgtgggctaccccccaccatcaccaatggagatttcattagcaccaacagagagaattttcactatggatcagtggtgacctaccgctgcaatcctggaagcggagggagaaaggtgtttgagcttgtgggtgagccctccatatactgcaccagcaatgacgatcaagtgggcatctggagcggccccgcccctcagtgcattatacctaacaaatgcacgcctccaaatgtggaaaatggaatattggtatctgacaacagaagcttattttccttaaatgaagttgtggagtttaggtgtcagcctggctttgtcatgaaaggaccccgccgtgtgaagtgccaggccctgaacaaatgggagccggagctaccaagctgctccaggggtgagtctgactgaggcctagaagggccctgccagtgacatgcgttgctgttggatcaggagattagtatttgttcagggggagggatgtgtgctgagcagggtcgaggagcaaattttctaggtagtgaacatgaaattcagaaggtgtgtgtacatgcacatgtgctgaaattgcgaagcaaagctcaacctgggcaagggatatgatgtttctttggggttcttataaacagatctatcaattacctttgagtataataatggttgatacaaaatgagtgattcctctggccgggcactataatacaggctacatgtgaattttaatccttaaaacaaagttattaggtagttaccagttgttctatgtttgtctgtattgttttgcttgagatactgtcttgatctgtcactcacgttgaactgctgtggtgccatcatgacttacttcaacctccgcctctctggctcaagcaagtctcctgcctgagcctcccaagtagctgggaatataggtgcatgccaccatgcctggataagttttttatatattttttgtagggatagagtctcaccatgttgcccaggctggtctcgaactcctcagctcaagcaattcacccaccttggcctcccaaagtgctgggattataggcatgagccaccgtgcccggcctctatgttttacagagaatatgtgccttagacacatcagataacattctgagacagtaacttgcagacaaaactggattgcaagtccacctcactccagagccttggctttgctcatcagcattcagtcatgaaatcaaaacttactctagatactttcaaggagggagggatttcatgcaggttgtattagtctgttctcacattcctataaaaaactacttgagcctgggtaatttataaagaaaagatgcttacttgactcagagttctgtaggctgtacaggaggcatggctagggacccctcaggaaagttacaatcatggtggaaggtaaagaggaagcacgcatatcttcatatgcttggcaggagagagagagagagcaaggcagaggtgctacacactttggaacaagcagatctcgagagaactctatcacaagacagcactagggtgatggtgctcaaccataagaaaccacctccatgatccagtcacttcccaccaggctccttctccaacactgggaattaccatttgacatgagatttgggaggggacatagagccaaaccatatcgcagctaataggtcacaaaaatgttagaagggcaggaaaagcaataggacaaaggcaaagttacgagagatcagggagctgctgtggctcccagtctacagcacaggagcctggagtgatggtgaaatggccagcccctcccactgagcaggcagctccctgtaagctgctagtgctgcaggagccaccactgctgccagaatgcagctgatattgctggagccaaagtcattggcatcgttacaattgaagctgtagctactcactgaagccatctatactgccactgcctgagccacttctagaagtagaacagattctgccatcatcctgctttttaatttggtatatatgcctccaattggcagaacctaaccagagcccagctatcaaggaagatgaacaattgtagttttaaggcttcctttgctagctgtcaaaagacagtgcagaagtgtgaggctgggggccaacagaaatttaaccagcacagcacctcaatattacatcaccaggcattgattagtccagggaaacactgggtgatgagccctgaaaatggacattacagcatcagagtatttacaaactccctaaagaagtcatttttctattccaatcccccatttgatgcttgagaaagctgaagtccagaaaagggaactgatctgctcaaagacaaaccgaaattattttttccattttataacagttttatgtaatttagttgagatccaaatgtgttctgatttcctgagttccaatcaactatattaagagagagccagcgctgcccttacaatatgttgcgtaaatatacactctcatcatggtgacagtaggtctttcagattttgttcgacagtttcccaccttctcactgaagtgaaatgaatgactaggcagcaccttgctacatagcatgaggagaggagacccatagttctttaccatcctatgtcaggtggccgctgagagaagacttgaaaggagatgagcatagatgtatggacgctctttgttgcaccagtgtgataggtgatggagggacctattagatgggacatgggcaggggcactcctttattgcttaaaatgcaagactaaattggtgatgcctttctagaaaggaagtatgaagatacaaaaatccatcattcctcccaattttgtactgggtgaacagtaattggaagcattctagaaggaactgtccattgtgaaatcttagttgcatactttagatgaaaaacaatgaattggagatacctctgttttagtcacagttgtgccacgtgtcagttctatgactgatggcaagacatcttccttgccctgtgtatttagtttatcaatgtaataaggctgttattctaactttattattatatatagattcgtaattattattcccttggccagtttaacagtgagaaaaaagttgttttcacacaattagctgtactttgtttctctctccccagtatgtcagccacctccagatgtcctgcatgctgagcgtacccaaagggacaaggacaacttttcacccgggcaggaagtgttctacagctgtgagcccggctacgacctcagaggggctgcgtctatgcgctgcacaccccagggagactggagccctgcagcccccacatgtgaaggtgactagactcttatctggcttgatatttttagcttgcgtctttattctccacatgccagtgatttctgttcatttttctttatctccagtgaaatcctgtgatgacttcatgggccaacttcttaatggccgtgtgctatttccagtaaatctccagcttggagcaaaagtggattttgtttgtgatgaagggtgagtatgagcttgcctgacctgctggacattgaaattggggttgggaatcagtctaaaaaggggagatttggtgtggcacacacacacacaccttcagagagatgaactttcgaaagtatacctaggaagaaaggaaagaaacatatagaactaataacatgagatatgaagaggaaactggaacatatattaactggcaagttcaaaggcaagtataactactggttatgaatatataagtaacacattaagcaaaaaatatcagccagaaacggtggctcacccctgtaatcctagcacctttgggaggttgaggcgggcagatcacctgaggtcaggagttggagaccagcctggacaacatgatgaaaccctgtctctactaaaaatacaaaagttagctgggtgtggtggcatgtgcctgtaatcccagctattccggaggctgaggcaccagaatcacttgaacctgggagatggagtttgcagtgagccgagatggcaccattgcactccagcgtggacaataagagtgaaactccatctcaggaaaaaaaatcatattttacaagcaaaaaggaatatgagtaatttagagagtcccaggaaaaaactggaagtaacaaaagcttattataaaaagctaggatcatttgtgaatcatttcagtaaattctttaaatcgtcaacagtgaaatttgtaataggactgaaaatgtaaaaatcagcattttttaaaaaaatccagccatatatcatctggttaatcatgggctctgggctctgagctggggtcctgatggctgctgttaatatttccagcaagctcattaccttgtttatgtccacctagtgctcttcgcagggtgcacatctctacacgggagctgaccggcatgggcaacaaagcacctgatcccaaaatgtaacacagaatcttggcagcctccaaatgccagcacccagtaagagttaggagggcatcggggtccagcagacattgagaattttcgacaattgcatgcaaaaaataagtcctctcttctttcctttttcccctagaatattcatgcttactcttcagcagcccaaattgcccttttgagccttcttcacgccatcacagatgtggagatgaaaggacagtctgttctctcgccagctatttcccacttttccactccaaactgggagctgttttacttgctgttccagggtcagagttaggaaggcattacattagaagactgggtttctaataacaacaatgagtgatttatcaggttatcatggagtaatcagtgaaactccaagcctgggtcctgggtcaaggggatggcgcctatgtcatgaccacctttttcagttcaagcaggactatcatgtgaccaagctactgcattttgccattctatattgttcccttctggaggctgtgatttttccagaataaggtagcctgtgcaactctgccacctgctggcctaaggtcctaataatcctgaaattggggctgggccttagattgtgaactaagggttctcttggctgaaacagctcacactattcactcctattttcttctttagatttcaattaaaaggcagctctgctagttactgtgtcttggctggaatggaaagcctttggaatagcagtgttccagtgtgtgaacgtgagtagcaggagtaacatttcaggccagtctctcccttcatctgttcagtatttgacccatgacctcccctaatgtggttcttcaattttctagtttgaattattgatttgaaaattgcttattttaataatgtttggttgtgaatcaaatgtatacatcacctgtctttggaaccatctgatctgtctctgtccttctgtattctgtgttctagtgcgataaatcctatggtagcatgattctaggtcaggagagattagataatgtgaagccttaacaatttgctttctttctctctttcttttgtttcttttttctcttccttcctttcttcagttctttcttcccttctctttctctcccctttcttccttccttcctccttctttcttttccattttgttcttccatcaggtgcagtctacaatttttgtatatatttgataatacacaaatattaaacatgcctttatttaatcaatatttattgatcacatactttgtgcctgatgttcatctagccacaggagttatatcagtgaacaagatgaatgaattccctgtccccatgttgtttccactcagttggggaaagggacaagaaaaaaaataaatacgatgctatgaagatagtagagcaaagcatttaggcatgagggaaaagtgaggagcaacattagacaaggcgagcagtttgagactccttaaattctcaaaacatgtacctaaataatttatgctgagagattcataaataatgtcatttttaaaaatttattatacttttaagttctagggtacatgtgcacaacgtgcaggtttgttacatatgtatacatgtgccatgttggtgtgctgcacccattaactcgtcatttacattaggtatatctcctaatgctatccctccccgcttcccccaccccacaacaggccccggtgtgtgatgttcccctttttgtgtccaagtgttctcactgttcaattcccacctatgagtgagaacatgtggtgtttggttttttgtccttgtgatagtttgctgagaatgatggtttccagcttcatccatgtccctaaaaaggacatgaactcatcaatttttatggctgcatagtattccatggtgtatatgtgccacattttcttaatccagtctatcattgatggacatttgggttggttccaagtctttgctattgtgaataatgcagcaataaacatatgtgtgcatgtgtctttatagcagcatgatttgtaatcctttgggtatatacccagtaatgggatcgctgggtcaaatggtatttctagttctagatctttgaggaatcaccacactgtcttccacaatggttgaactaggttacagtcccaccaacagtgtaaaaatgttcctatttctccacatcttctccagcacctgttgtttcctgactttttaatgatagccattctaactggtgtgagatggtatctcattgtggttttgatttgcatttctctgatggccagtgatgatgagcattttttcatgtgtctgttagctgcataaatgtcttcttttgagaagtgtctgttcatatccttcacccactttttgatggggttgtttttttcttttaaatttgtttgagttcattgtagattctggatattagccctttgtcagatgagtagattgcaaaaatgttctcccattctgtaggttgtctgttcactctgatggtagtttcttttgctgtgcagaagctctttagtttaattatatcccctttgtcaattttggcttttgttgccattgcttttggtgttttagacatgaagtccttgcccatgcctgtgtcctgaatggtattgcctatgttttcttctaggatttttatggttttaggtctaacatttatgtctttaatccatcttgaattaatttttgtatacagtgtaaggaagggatccagtttcagctttctacatatggctagccagttttcccagtaccatttattaaatagggaatcctttccccatttcttgtttttgtcaggtttgtcaaagatcagatggttgtagatgtgtagtattatttctgagggctctgttctgttgcattggtctatatctctgttttggtaccagtaccatgctgttttggttactgtagccttgtagtatagtttgaagtcaggtagtttgatgcctccagtttgttcttttggcttaggatagacttggcaatgcaggctttttaaataatgtcatttttaaaaaatgagccccatatgttcaataatgagtagactactgatttctcctagtctccccatttataatttccccaatagaagatagaactttgcttcatttcttgattctaatgattgggaaatgtgtttctttagaaaaccatgaaattttactaaaatgtttatgttgttagaaatggacatcttacagtgctttttagagtaaaattttggaagaacataacttatatagagattcttgctgtctaagaaattcagtgctccttgaagcagcatgacaaatttctgttctaccatcatgaatgaaagctcattgattggactactcaagctttctcttatttttcataactgttgctagttaaagtagcttcttccaaattccagttctaatgaaaaatgccaattagaaatgaggaagaaactgttctaaacaaatcagcagatgctagaaaggagaaacaacttgaaacctgacccagaaagttaaaagagaaaataaatcatcaacagacctagacattttcaaaagcaaagccatctgaatccatttggagttgttttttatcatggccttactatgttttaattcactgtgacagggctattgttatcactgagattgatgatcaatatcaagaagtaatcagcgaaaggtttcacctatttaagatgattagcacacatatgtacatttgagaaatatttcctaagaatgcaggctccttcctcagcactctgtccccaggatcctgatgagtggctgacacaggacaagtgcttaattaatatatattgactaaatgaatgagcaacccttcaaaatggctatttttctttttcaaatgttttgctacttcattaaagttgtaaagtttccattgtccaggaaccgttactatccggaagattcaggatagacaagtctcttttgtactttgcaatacactttcattgatatctcatttaatccaactcttcaaagtcctaatgtctactgtcatctccttagcatattttcagcaacaccaatcatagcaccctgtaattgcagaatacctctggtgaaactcctgaatgaaacttagagctttcatgttttttctagaaatcttttgtccaagtcctccagttattcctaatgggagacacacaggaaaacctctggaagtctttccctttgggaaaacagtaaattacacatgcgacccccacccagacagagggacgagcttcgacctcattggagagagcaccatccgctgcacaagtgaccctcaagggaatggggtttggagcagccctgcccctcgctgtggaattctgggttagtgctcatttccccacatcccaaatgggttcagaatatctaacccaggccctccatatttccgtaattacaatgtggtatttatttgtgcatttgccacaatggaatgccaaaccaatgatagatggttctaaggtaggtcaacacataagatcctgatgacctttgcagatggagggactgatgaaaaaagagggaggcggtgagtggtgggaaagtccttcattagaatcatatgaattaaaaacagatgcctgtgaatctccttattgaaatgtttggtttagaaatctgacctagaaaatcggtggctccttctgccaggaaacgtcttgagttcccgcccatgcttgacagcctctcattggagttttgatgacttgaagtacaaggaaaccagacaggaaaggtggaacctgggcagaaaaactctttctggcttcctaaaaatgtgaaaaattaaatgggagctatctttacattaaattatatgagcattagctgagcgtggtggcaattgcctgtggtcccagctannnnnnnnnnnnnnnnnnnnnnnnnnnnnnnnnnnnnnnnnnnnnnnnnnnnnnnnnnnnnnnnnnnnnnnnnnnnnnnnnnnnnnnnnnnnnnnnnnnnnnnnnnnnnnnnnnnnnnnnnnnnnnnnnnnnnnnnnnnnnnnnnnnnnnnnnnnnnnnnnnnnnnnnnnnnnnnnnnnnnnnnnnnnnnnnnnnnnnnnnnnnnnnnnnnnnnnnnnnnnnnnnnnnnnnnnnnnnnnnnnnnnnnnnnnnnnnnnnnnnnnnnnnnnnnnnnnnnnnnnnnnnnnnnnnnnnnnnnnnnnnnnnnnnnnnnnnnnnnnnnnnnnnnnnnnnnnnnnnnnnnnnnnnnnnnnnnnnnnnnnnnnnnnnnnnnnnnnnnnnnnnnnnnnnnnnnnnnnnnnnnnnnnnnnnnnnnnnnnnnnnnnnnnnnnnnnnnnnnnnnnnnnnnnnnnnnnnnnnnnnnnnnnnnnnnnnnnnnnnnnnnnnnnnnnnnnnnnnnnnnnnnnnnnnnnnnnnnnnnnnnnnnnnnnnnnnnnnnnnnnnnnnnnnnnnnnnnnnnnnnnnnnnnnnnnnnnnnnnnnnnnnnnnnnnnnnnnnnnnnnnnnnnnnnnnnnnnnnnnnnnnnnnnnnnnnnnnnnnnnnnnnnnnnnnnnnnnnnnnnnnnnnnnnnnnnnnnnnnnnnnnnnnnnnnnnnnnnnnnnnnnnnnnnnnnnnnnnnnnnnnnnnnnnnnnnnnnnnnnnnnnnnnnnnnnnnnnnnnnnnnnnnnnnnnnnnnnnnnnnnnnnnnnnnnnnnnnnnnnnnnnnnnnnnnnnnnnnnnnnnnnnnnnnnnnnnnnnnnnnnnnnnnnnnnnnnnnnnnnnnnnnnnnnnnnnnnnnnnnnnnnnnnnnnnnnnnnnnnnnnnnnnnnnnnnnnnnnnnnnnnnnnnnnnnnnnnnnnnnnnnnnnnnnnnnnnnnnnnnnnnnnnnnnnnnnnnnnnnnnnnnnnnnnnnnnnnnnnnnnnnnnnnnnnnnnnnnnnnnnnnnnnnnnnnnnnnnnnnnnnnnnnnnnnnnnnnnnnnnnnnnnnnnnnnnnnnnnnnnnnnnnnnnnnnnnnnnnnnnnnnnnnnnnnnnnnnnnnnnnnnnnnnnnnnnnnnnnnnnnnnnnnnnnnnnnnnnnnnnnnnnnnnnnnnnnnnnnnnnnnnnnnnnnnnnnnnnnnnnnnnnnnnnnnnnnnnnnnnnnnnnnnnnnnnnnnnnnnnnnnnnnnnnnnnnnnnnnnnnnnnnnnnnnnnnnnnnnnnnnnnnnnnnnnnnnnnnnnnnnnnnnnnnnnnnnnnnnnnnnnnnnnnnnnnnnnnnnnnnnnnnnnnnnnnnnnnnnnnnnnnnnnnnnnnnnnnnnnnnnnnnnnnnnnnnnnnnnnnnnnnnnnnnnnnnnnnnnnnnnnnnnnnnnnnnnnnnnnnnnnnnnnnnnnnnnnnnnnnnnnnnnnnnnnnnnnnnnnnnnnnnnnnnnnnnnnnnnnnnnnnnnnnnnnnnnnnnnnnnnnnnnnnnnnnnnnnnnnnnnnnnnnnnnnnnnnnnnnnnnnnnnnnnnnnnnnnnnnnnnnnnnnnnnnnnnnnnnnnnnnnnnnnnnnnnnnnnnnnnnnnnnnnnnnnnnnnnnnnnnnnnnnnnnnnnnnnnnnnnnnnnnnnnnnnnnnnnnnnnnnnnnnnnnnnnnnnnnnnnnnnnnnnnnnnnnnnnnnnnnnnnnnnnnnnnnnnnnnnnnnnnnnnnnnnnnnnnnnnnnnnnnnnnnnnnnnnnnnnnnnnnnnnnnnnnnnnnnnnnnnnnnnnnnnnnnnnnnnnnnnnnnnnnnnnnnnnnnnnnnnnnnnnnnnnnnnnnnnnnnnnnnnnnnnnnnnnnnnnnnnnnnnnnnnnnnnnnnnnnnnnnnnnnnnnnnnnnnnnnnnnnnnnnnnnnnnnnnnnnnnnnnnnnnnnnnnnnnnnnnnnnnnnnnnnnnnnnnnnnnnnnnnnnnnnnnnnnnnnnnnnnnnnnnnnnnnnnnnnnnnnnnnnnnnnnnnnnnnnnnnnnnnnnnnnnnnnnnnnnnnnnnnnnnnnnnnnnnnnnnnnnnnnnnnnnnnnnnnnnnnnnnnnnnnnnnnnnnnnnnnnnnnnnnnnnnnnnnnnnnnnnnnnnnnnnnnnnnnnnnnnnnnnnnnnnnnnnnnnnnnnnnnnnnnnnnnnnnnnnnnnnnnnnnnnnnnnnnnnnnnnnnnnnnnnnnnnnnnnnnnnnnnnnnnnnnnnnnnnnnnnnnnnnnnnnnnnnnnnnnnnnnnnnnnnnnnnnnnnnnnnnnnnnnnnnnnnnnnnnnnnnnnnnnnnnnnnnnnnnnnnnnnnnnnnnnnnnnnnnnnnnnnnnnnnnnnnnnnnnnnnnnnnnnnnnnnnnnnnnnnnnnnnnnnnnnnnnnnnnnnnnnnnnnnnnnnnnnnnnnnnnnnnnnnnnnnnnnnnnnnnnnnnnnnnnnnnnnnnnnnnnnnnnnnnnnnnnnnnnnnnnnnnnnnnnnnnnnnnnnnnnnnnnnnnnnnnnnnnnnnnnnnnnnnnnnnnnnnnnnnnnnnnnnnnnnnnnnnnnnnnnnnnnnnnnnnnnnnnnnnnnnnnnnnnnnnnnnnnnnnnnnnnnnnnnnnnnnnnnnnnnnnnnnnnnnnnnnnnnnnnnnnnnnnnnnnnnnnnnnnnnnnnnnnnnnnnnnnnnnnnnnnnnnnnnnnnnnnnnnnnnnnnnnnnnnnnnnnnnnnnnnnnnnnnnnnnnnnnnnnnnnnnnnnnnnnnnnnnnnnnnnnnnnnnnnnnnnnnnnnnnnnnnnnnnnnnnnnnnnnnnnnnnnnnnnnnnnnnnnnnnnnnnnnnnnnnnnnnnnnnnnnnnnnnnnnnnnnnnnnnnnnnnnnnnnnnnnnnnnnnnnnnnnnnnnnnnnnnnnnnnnnnnnnnnnnnnnnnnnnnnnnnnnnnnnnnnnnnnnnnnnnnnnnnnnnnnnnnnnnnnnnnnnnnnnnnnnnnnnnnnnnnnnnnnnnnnnnnnnnnnnnnnnnnnnnnnnnnnnnnnnnnnnnnnnnnnnnnnnnnnnnnnnnnnnnnnnnnnnnnnnnnnnnnnnnnnnnnnnnnnnnnnnnnnnnnnnnnnnnnnnnnnnnnnnnnnnnnnnnnnnnnnnnnnnnnnnnnnnnnnnnnnnnnnnnnnnnnnnnnnnnnnnnnnnnnnnnnnnnnnnnnnnnnnnnnnnnnnnnnnnnnnnnnnnnnnnnnnnnnnnnnnnnnnnnnnnnnnnnnnnnnnnnnnnnnnnnnnnnnnnnnnnnnnnnnnnnnnnnnnnnnnnnnnnnnnnnnnnnnnnnnnnnnnnnnnnnnnnnnnnnnnnnnnnnnnnnnnnnnnnnnnnnnnnnnnnnnnnnnnnnnnnnnnnnnnnnnnnnnnnnnnnnnnnnnnnnnnnnnnnnnnnnnnnnnnnnnnnnnnnnnnnnnnnnnnnnnnnnnnnnnnnnnnnnnnnnnnnnnnnnnnnnnnnnnnnnnnnnnnnnnnnnnnnnnnnnnnnnnnnnnnnnnnnnnnnnnnnnnnnnnnnnnnnnnnnnnnnnnnnnnnnnnnnnnnnnnnnnnnnnnnnnnnnnnnnnnnnnnnnnnnnnnnnnnnnnnnnnnnnnnnnnnnnnnnnnnnnnnnnnnnnnnnnnnnnnnnnnnnnnnnnnnnnnnnnnnnnnnnnnnnnnnnnnnnnnnnnnnnnnnnnnnnnnnnnnnnnnnnnnnnnnnnnnnnnnnnnnnnnnnnnnnnnnnnnnnnnnnnnnnnnnnnnnnnnnnnnnnnnnnnnnnnnnnnnnnnnnnnnnnnnnnnnnnnnnnnnnnnnnnnnnnnnnnnnnnnnnnnnnnnnnnnnnnnnnnnnnnnnnnnnnnnnnnnnnnnnnnnnnnnnnnnnnnnnnnnnnnnnnnnnnnnnnnnnnnnnnnnnnnnnnnnnnnnnnnnnnnnnnnnnnnnnnnnnnnnnnnnnnnnnnnnnnnnnnnnnnnnnnnnnnnnnnnnnnnnnnnnnnnnnnnnnnnnnnnnnnnnnnnnnnnnnnnnnnnnnnnnnnnnnnnnnnnnnnnnnnnnnnnnnnnnnnnnnnnnnnnnnnnnnnnnnnnnnnnnnnnnnnnnnnnnnnnnnnnnnnnnnnnnnnnnnnnnnnnnnnnnnnnnnnnnnnnnnnnnnnnnnnnnnnnnnnnnnnnnnnnnnnnnnnnnnnnnnnnnnnnnnnnnnnnnnnnnnnnnnnnnnnnnnnnnnnnnnnnnnnnnnnnnnnnnnnnnnnnnnnnnnnnnnnnnnnnnnnnnnnnnnnnnnnnnnnnnnnnnnnnnnnnnnnnnnnnnnnnnnnnnnnnnnnnnnnnnnnnnnnnnnnnnnnnnnnnnnnnnnnnnnnnnnnnnnnnnnnnnnnnnnnnnnnnnnnnnnnnnnnnnnnnnnnnnnnnnnnnnnnnnnnnnnnnnnnnnnnnnnnnnnnnnnnnnnnnnnnnnnnnnnnnnnnnnnnnnnnnnnnnnnnnnnnnnnnnnnnnnnnnnnnnnnnnnnnnnnnnnnnnnnnnnnnnnnnnnnnnnnnnnnnnnnnnnnnnnnnnnnnnnnnnnnnnnnnnnnnnnnnnnnnnnnnnnnnnnnnnnnnnnnnnnnnnnnnnnnnnnnnnnnnnnnnnnnnnnnnnnnnnnnnnnnnnnnnnnnnnnnnnnnnnnnnnnnnnnnnnnnnnnnnnnnnnnnnnnnnnnnnnnnnnnnnnnnnnnnnnnnnnnnnnnnnnnnnnnnnnnnnnnnnnnnnnnnnnnnnnnnnnnnnnnnnnnnnnnnnnnnnnnnnnnnnnnnnnnnnnnnnnnnnnnnnnnnnnnnnnnnnnnnnnnnnnnnnnnnnnnnnnnnnnnnnnnnnnnnnnnnnnnnnnnnnnnnnnnnnnnnnnnnnnnnnnnnnnnnnnnnnnnnnnnnnnnnnnnnnnnnnnnnnnnnnnnnnnnnnnnnnnnnnnnnnnnnnnnnnnnnnnnnnnnnnnnnnnnnnnnnnnnnnnnnnnnnnnnnnnnnnnnnnnnnnnnnnnnnnnnnnnnnnnnnnnnnnnnnnnnnnnnnnnnnnnnnnnnnnnnnnnnnnnnnnnnnnnnnnnnnnnnnnnnnnnnnnnnnnnnnnnnnnnnnnnnnnnnnnnnnnnnnnnnnnnnnnnnnnnnnnnnnnnnnnnnnnnnnnnnnnnnnnnnnnnnnnnnnnnnnnnnnnnnnnnnnnnnnnnnnnnnnnnnnnnnnnnnnnnnnnnnnnnnnnnnnnnnnnnnnnnnnnnnnnnnnnnnnnnnnnnnnnnnnnnnnnnnnnnnnnnnnnnnnnnnnnnnnnnnnnnnnnnnnnnnnnnnnnnnnnnnnnnnnnnnnnnnnnnnnnnnnnnnnnnnnnnnnnnnnnnnnnnnnnnnnnnnnnnnnnnnnnnnnnnnnnnnnnnnnnnnnnnnnnnnnnnnnnnnnnnnnnnnnnnnnnnnnnnnnnnnnnnnnnnnnnnnnnnnnnnnnnnnnnnnnnnnnnnnnnnnnnnnnnnnnnnnnnnnnnnnnnnnnnnnnnnnnnnnnnnnnnnnnnnnnnnnnnnnnnnnnnnnnnnnnnnnnnnnnnnnnnnnnnnnnnnnnnnnnnnnnnnnnnnnnnnnnnnnnnnnnnnnnnnnnnnnnnnnnnnnnnnnnnnnnnnnnnnnnnnnnnnnnnnnnnnnnnnnnnnnnnnnnnnnnnnnnnnnnnnnnnnnnnnnnnnnnnnnnnnnnnnnnnnnnnnnnnnnnnnnnnnnnnnnnnnnnnnnnnnnnnnnnnnnnnnnnnnnnnnnnnnnnnnnnnnnnnnnnnnnnnnnnnnnnnnnnnnnnnnnnnnnnnnnnnnnnnnnnnnnnnnnnnnnnnnnnnnnnnnnnnnnnnnnnnnnnnnnnnnnnnnnnnnnnnnnnnnnnnnnnnnnnnnnnnnnnnnnnnnnnnnnnnnnnnnnnnnnnnnnnnnnnnnnnnnnnnnnnnnnnnnnnnnnnnnnnnnnnnnnnnnnnnnnnnnnnnnnnnnnnnnnnnnnnnnnnnnnnnnnnnnnnnnnnnnnnnnnnnnnnnnnnnnnnnnnnnnnnnnnnnnnnnnnnnnnnnnnnnnnnnnnnnnnnnnnnnnnnnnnnnnnnnnnnnnnnnnnnnnnnnnnnnnnnnnnnnnnnnnnnnnnnnnnnnnnnnnnnnnnnnnnnnnnnnnnnnnnnnnnnnnnnnnnnnnnnnnnnnnnnnnnnnnnnnnnnnnnnnnnnnnnnnnnnnnnnnnnnnnnnnnnnnnnnnnnnnnnnnnnnnnnnnnnnnnnnnnnnnnnnnnnnnnnnnnnnnnnnnnnnnnnnnnnnnnnnnnnnnnnnnnnnnnnnnnnnnnnnnnnnnnnnnnnnnnnnnnnnnnnnnnnnnnnnnnnnnnnnnnnnnnnnnnnnnnnnnnnnnnnnnnnnnnnnnnnnnnnnnnnnnnnnnnnnnnnnnnnnnnnnnnnnnnnnnnnnnnnnnnnnnnnnnnnnnnnnnnnnnnnnnnnnnnnnnnnnnnnnnnnnnnnnnnnnnnnnnnnnnnnnnnnnnnnnnnnnnnnnnnnnnnnnnnnnnnnnnnnnnnnnnnnnnnnnnnnnnnnnnnnnnnnnnnnnnnnnnnnnnnnnnnnnnnnnnnnnnnnnnnnnnnnnnnnnnnnnnnnnnnnnnnnnnnnnnnnnnnnnnnnnnnnnnnnnnnnnnnnnnnnnnnnnnnnnnnnnnnnnnnnnnnnnnnnnnnnnnnnnnnnnnnnnnnnnnnnnnnnnnnnnnnnnnnnnnnnnnnnnnnnnnnnnnnnnnnnnnnnnnnnnnnnnnnnnnnnnnnnnnnnnnnnnnnnnnnnnnnnnnnnnnnnnnnnnnnnnnnnnnnnnnnnnnnnnnnnnnnnnnnnnnnnnnnnnnnnnnnnnnnnnnnnnnnnnnnnnnnnnnnnnnnnnnnnnnnnnnnnnnnnnnnnnnnnnnnnnnnnngccaggagaaattagagcagaaatatctctttcaatagtgagagaataggaaaaagaagtagaaaagctgggaacaataggtaaagtttaggctaggccttagacttctcctgcattgtaatccctctggtttgccacatatgcatgctgtcaggaagttgatgaggtatgtacagcacaatttattttccattttttgcctttaggcaccgactcattggtcactcatctgctgaatgtatcctctcgggcaatgctgcccattggagcacgaagccgccaatttgtcaacgtgagttgaaatctctttccccattcaccccaccgtttaatcctagagttgtcctcctagaattacaaagaatggatctcatccctcttggaaatggtatccttctcatatttgaagaatccagtcatatccttaaaatggctcacagcattccaaacttccaccttcagctagaaatgcttttttattttttcttatctcaaggtctaattttttttaaactagtctttagctcacttaaacagtcccccaatttcatcctctgttgggtgaacacctcccagtttaaagagcattttatttagtgaagtcaacaaatacaaagtcagtgaaagaaaccccatatcctctctgcaagctcttagtatcacatcagatattcaagccatgcagctctttcttccttcttattctttgtctaaacaggatcatgccatcttccctgtgagttgtttggaagatgagctttctacattttggggagcaaagacgaatgagcaattgcaagctaacaaggaatataaaatgtgtataatcctgggtttagtgatggtgtgaggaaatcagcaatttcaaacccagttggtgggaggataagtgggaacaaactttgtagaaggccaataaactggctgggcactgccctacggtagagtaggacacagtattcagttcttccaagatcagacgagattgggcgcatttagggtggtatggttgtagatcagtatccagttctttttattatttctgaatctgtaagtatcatgtttattatatgtaatattgtatatttgtactttgtctttgttagttcttccagagcttttgttcttattatttaataaagatgttatactgagccacatgtggtgactcaaacgtgtaatcccagcactttgggaggcctaggtgagcagatggcttgagtccaggagtttgagaccagcctgtacaacatactgaaacgctgtctctacaaaaatacaaaaactatacgggcatggtggcacatgcctgtagtcccaactactcaggagactgagaggtgggaggattgcttgagccagagaggtcgaggctgcaatgagccatgatcgtgccactgcactccagtctgggcagcagagcaagaccttgtctcaaaaaaaatgctatgctgtatgctttattatattaatatccaatagaataaagacacatgccttctatatagagagaactaaattaataatggtgagataacagttaaattctcatttagcaggagaaataaaaacatagactataggctaggcacagtggctcatacctgtaatcccagcacattaggaggctgaggtgggcagatcacttgaggtcagtagtttgagaccaccctggccaacataatgaaaccccgcctctactaaaaatacaaaagttagccgagtttggtggcgcatgcctgaaatcccagctactcaggaggctgaggcaggaaaatcgcttgaacctgggaggcaagggctgcagtgagccaagatcacgccactgcactccagcctggggaacagagtgaggatctgttaaaaaaaaaaaaaaaaagtggactctaataatacatggacacatttagtgaaataaacttaactgagtagagcagaacttataatattttaaaactgtaagaacatgtctgtacattagcaaatagtagatgagaatagtattttcaatatttacttctggtaatttggaattaaaaaaaaaacttttgggaaaatttacaataaagtatgattttaacaaaccagtctaggcgtggtggctcacgcttataatcccagcactttgaaaagcagaggcatgcagattgcttgaggccaggagttcaagactagcctgcccaacatggccaaaccccatctctactaaaaatacaaaaataaaccagacatggtagtgcatgcctgtgatcccagctactcgggaagttgaggtaggaggattgcttgacctgggaagtggaggttgcagtgagccatgatcgtgccactacactccagcctgggtgacagagcaagactctgtcccaaggttttgttttggttaacttgctgtccctttttccaggaattccttgtgggctaccccccaccatcgccaatggagatttcattagcaccaacagagagaattttcactatggatcagtggtgacctaccgctgcaatcctggaagcggagggagaaaggtgtttgagcttgtgggtgagccctccatatactgcaccagcaatgacgatcaagtgggcatctggagcggcccggcccctcagtgcattacacctaacaaatgcacgcctccaaatgtggaaaatggaatattggtatctgacaacagaagcttattttccttaaatgaagttgtggagtttaggtgtcagcctggctttgtcatgaaaggaccccgccgtgtgaagtgccaggccctgaacaaatgggagccggagctaccaagctgctccaggggtgagtctgactgaggcctagtagggccctgcaagtgacatgcgttgctgttggatcaggagattagtatttgttcacggggagggatgtgtgctgagcagggtcgaggagcaaattttctaagtagtgaacatgaaattcaggtgtgtagacatgcacatgtgctgaaattgcgaagcaaagctcaacctgggcaagggatatgatgtttctttggggttcttataaacagatctatcaattacctttgagtataataatggttgatacaaaatgagtgattcctctgcccaggcactataatacaggctacatgtgaattttaatcctgaaaacaaagttattaggtagttcccagttgttctatgtttgtctgttttgttttgcttgagatactgtcttgatctgtcactcaggttggactgcagtggtgccatcatggcatacttcaccctccacctccctgactcaagcaagtctcctgcctgagcctcccaagtagctgggaatgtaggtgcatgccaccatgcctggctaagttttttatattttttttgtagggacagagtctcaccatgctgcccaggctggtctcaaactcctcagctcaagcacccacccaccttgggctcccaaagtgctgggattataggcatgagccactgtgcccggcctctatgttttacagagaatatgtgccttagacacatcagataacattctgagacagtaacttgcagacaaaactggattgcaagtccacctcactccagagccttggctttgctcatcagcattcagtcatgaaatcaaaacttactctagatactttcaaggagggagggatttcatgcaggttgtattagtctgttctcacattcctataaaaaactacttgagcctgggtaatttataaagaaaagatgtttaattgactcagagttctgtaggctgtacaggaggcatggctgggaaagttacaatcatggtggaaggcaaagaggaagcacgcatatcttcatatgcttggcaggagagagagagagagcaaggcagaggtgttacagactttgaaacaagcagatcttgacagaactctatcacaagacagcactagggtgatggtgctcaaccattagaaaccacctccatgatccagtcacctcccaccaggctccttctccaacactgggaattaccatttgacatgagatttgggaggggacatagagccaaaccatatcgcagctaataggtcacaaaaatgttagaagggcaggaaaagcaataggacaaaggcaaagttacgagagatcagggagctgctgtggctcccagtctacagcacaggagcctggagtgatggtgaaatggccagcccctcccactgagcaggcagctccctgtaagctgctaatactgcaggagccaccattgctgccagaatgcagctgatattgctggagccaaagtcattggcatcgttacaattgaagctgtagctactcactgaagccatctatactgccactgcctgagccacttctagaagtagaacagattctgccatcatcctgctttttaatttggtatatatgcctccaattggcagaacctaaccagagcctagctatcaaggaagatgaacgatttatttttaaggcctccattgttagctgtcaaaagacagtgcagaagtgtgaggctgggggccaacagaaatttaaccagcacagcacctcaatattacatcaccaggcattgattagtccagggaaacactgggtgatgagccctgaaaatggacattacagcatcagagtatttacaaactccttaaagaagtcatttttctattccaatcccccatttgatgcttgagaaagctgaagtccagaaaagggaactgatctgctcaaagacaaactgaaattactttttccattttataacagttttatgtaatttatttgagatccaaatgtgttttgatttcccaagatcagatcaactacattaagagagagcctgagatgccgttacaatatgttgtgtgaaattacactctcattatggtgacagtaggtctttcagattttgttcgacagtttcccaccttctcactgaagtgaaatgaatgactaggcagcaccttgctacatagcatgaagagaggagacccatagttctttaccaccctatgtcaggtggccgctgagagaagacttgaaaggagatgagcatagatgtatggacgctctttgttgcaccagtgtgataggtgatggagggacctattagatgggacatgggcaggggcactcctttattgcttaaaatgcaagactaaattggtgatgcctttctagaaaggaagtatgaagatacaaaaatccatcattcctcccaattttgtactgggtgaacagtaattggaagcattctagaaggaactgtccattgtgaaatcttagttgcatactttagatgaaaaacaatgaattggagatacctctgttttagtcacagttgtgccatgtgtcagttctatgactgatggcaagacatcttccttgccccgtgtatttagtttatcaatgtaataaggctgttattctaactttattattatatatagattcgtaattattattcccttggccagtttaacagtgagaaaaaagttgttttcacacaattagctgtactttgtttctctctccccagtatgtcagccacctccagatgtcctgcatgctgagcgtacccaaagggacaaggacaacttttcacccgggcaggaagtgttctacagctgtgagcccggctacgacctcagaggggctgcgtctatgcgctgcacaccccagggagactggagccctgcagcccccacatgtgaaggtgactagactcttatctggcttgatatttttagcttgcgtctttattctccacatgccagtgatttctgttcatttttctttatctccagtgaaatcctgtgatgacttcatgggccaacttcttaatggccgtgtgctatttccagtaaatctccagcttggagcaaaagtggattttgtttgtgatgaagggtgagtatgagcttgcctgacctgctggacattgaaattggggttgggaatcagtctaaaaaggggagatttggtgtggcacacacacacacaccttcagagagatgaactttcgaaagtatacctaggaagaaaggaaagaaacatatagaactaataacatgagatatgaagaggaaactggaacatatattaactggcaagttcaaaggcaagtataactagtggttatgaatatataggtaacacattaagcaaaaaatatcagccagaaacggtggctcacgtgtgtaatcccagcacctttgggaggttgaggcaggcagatcacctgaggtcaggagttggagaccagcctggacaacatggtgaaaccctgtctctactaaaaatacaaaagttagctgggtttggtggcatgtgcctgtaatcccagctactccggaggctgaggcaccagaatcacttgaacctgggaggcggagtttgcagtgagccgagatggcaccattgcactccagcgtgaacaatgagtgaaactccatctcaggaaaaaaatcatattttacaagcaaaagggaatatgagtaatttagagagtcccaggaaaaattgcaagtaatgaaaagcttattattaaaagctaggatcctttaagaatcatttcagtaaattctttaaaccatcaacagtgaaatttgtaataggactgaaaatgtaaaaatcagcatttttttaaaaattcagtcatatatcttctggctagtcatgggctctgggctctgagctggggtcgtgatggctgctgttaatattcccagcaaggtcattaccttgtttatgtccatctagtgctcttcacagcgtgcacatctctacacaggagctgaccggcatgggcaacaaagcacctgatcccataatgtaacacagaatcttggcagcctccaaatgccagcacccagtaagagttaggagggcatcagggtccaaaagactgagaattttcgacaattgcatacaaaaatcatgtcctctcttctttcctttttcccctagaatattcatgcttactcttcagcagcccaaactgcccttttgagccttcttcacgccatcacagatgtggagatgaaaggacaatctctgttctctcgccagctatttcccacttttccactccaaactgggagctgttttacttgctgttccagggtcagagttaggaaggcattacattagaagactgggtttctaataacaacaatgagtgatttatcaggttatcatggagtaatcagtgaaactccaagcctgggtcctgggtcaaggggatggcgcctatgtcatgaccacctttttcaattcaagcaggactatcatgtgaccaagctactacattttgccattctatattgttcccttctggaggctgtgatttttccagaataaggtagcctgtgcaactctgccatctgctggcctcagatcctcaaaatcctgaaattggggctgggccttagattgtgaactaagtgtcctcttggctgaaacagctcactattcactcctattttcttctttagatttcaattaaaaggcagctctgctagttattgtgtcttggctggaatggaaagcctttggaatagcagtgttccagtgtgtgaacgtgagtaataggagcaacatttcaggccaatctctccccttcatctgttcactatttgtcctatggcctccctcaatgtgattcttcaatattctagtcttaattatcgatttaaaaatagtttattttaataatgtttggttgtgaatcaatatgtacatcacctgtctttgcaaccatctgatctgtctctgtccttctgcattctctgttctagtgcgataaatcctttggtcttgtgctcctaggtcaggagagattagataatgtgaagctttaacaattttctttctttctctagttttttctttcttttttctcttccttccatccttcagttctttcttcccttcttctctccttctcccctttcttctttccttcctcccttctttctttttcattttgttctcccatcaaagtgcagtcagtctacaatttatatatatatgataatacacaaatattgaacatggctttatttaatcaatatttattgatcacatactttgtgcctgatgttcatctagccactggagttatatcaatgaacaagatggatgaattccctgtccccatgttgtttctacttaggtggggagagggacaagaaaaaaaataaattcaatgctatgagacaatagagcaaagcactgaggaatgaggcaaaaatggggagcaacattagacagggtgagcagtttgagactccttaaattctcaaaacatgtacctaaataatttatgctgagagattcataaataataagtcattttttttaaatgagcctcatatgttcaataatcagtagactactgatttctcctagtctacccatgtataatttccccaatggaagatagaactttgcttcaattcttgattctaatgattggaaaacgtgtttctttagaaaatcatgaaattttactaaaatgtttatgttgttagaaatatacttggacatcttacagtgatttttagagtaaaattttggaagaacataacttatatagagattcttgctgtctaagaaatccagtgctccttgaagcagtatgacaagtgtctgttctactatcatgaatgaaagctcattaactggactactcaagctttctcttatttttcataactcttgctagttaaaatagtttcttccaaatgccagttctaatgaaaaatgccaattagaaatgaggaagagactgttctaaacaaatcattagatgctagaaaggagtaacaacttgaaacctgacccagagagtaaaaagagaaaataaatcatcaacagacctagacattttcaaaagcaaagccatctgaatccatttggagttttttttttttttttatcatggcctgactatgtttcaattcactgtgacagggctattgttatcactgagattgatgatcaatatcaataagtaatcagtgaaaggtttcacctatttaagatgattagcacacatatatacatttgagaaatatttcctaagaatgtaggctccttcctcagcgctgtgtccccaggatcctgatgaagggctgacacaggataagtgctcaattaatatatattgactaaatgaataaataacccttcaaaatggttatttttcttcttcaaatgttttgctacttcattaaagttgtaaagtttctactgtccaggaactgttactatccggaagattcaggatagacaaatctcttttgtactttgcaatacattttcattgacatctcatttaatccaactcttcaaagtcctaatgtctactgtcatctccttagcatattttcagcaacaccaatcatagcaccctgtaattgcagaatacctctggtgaaactcctgaatgaaacttagagcttttgtatgttttctagaaatcttttgtccaagtcctccagttattcctaatgggagacacacaggaaaacctctggaagtctttccctttggaaaagcagtaaattacacatgcgacccccacccagacagagggacgagcttcgacctcattggagagagcaccatccgctgcacaagtgaccctcaagggaatggggtttggagcagccctgcccctcgctgtggaattctgggttagtgctcatttccccacatccctaatgggttcagaatatctaacccagccnnnnnnnnnnnnnnnnnnnnnnnnnnnnnnnnnnnnnnnnnnnnnnnnnnnnnnnnnnnnnnnnnnnnnnnnnnnnnnnnnnnnnnnnnnnnnnnnnnnnnnnnnnnnnnnnnnnnnnnnnnnnnnnnnnnnnnnnnnnnnnnnnnnnnnnnnnnnnnnnnnnnnnnnnnnnnnnnnnnnnnnnnnnnnnnnnnnnnnnnnnnnnnnnnnnnnnnnnnnnnnnnnnnnnnnnnnnnnnnnnnnnnnnnnnnnnnnnnnnnnnnnnnnnnnnnnnnnnnnnnnnnnnnnnnnnnnnnnnnnnnnnnnnnnnnnnnnnnnnnnnnnnnnnnnnnnnnnnnnnnnnnnnnnnnnnnnnnnnnnnnnnnnnnnnnnnnnnnnnnnnnnnnnnnnnnnnnnnnnnnnnnnnnnnnnnnnnnnnnnnnnnnnnnnnnnnnnnnnnnnnnnnnnnnnnnnnnnnnnnnnnnnnnnnnnnnnnnnnnnnnnnnnnnnnnnnnnnnnnnnnnnnnnnnnnnnnnnnnnnnnnnnnnnnnnnnnnnnnnnnnnnnnnnnnnnnnnnnnnnnnnnnnnnnnnnnnnnnnnnnnnnnnnnnnnnnnnnnnnnnnnnnnnnnnnnnnnnnnnnnnnnnnnnnnnnnnnnnnnnnnnnnnnnnnnnnnnnnnnnnnnnnnnnnnnnnnnnnnnnnnnnnnnnnnnnnnnnnnnnnnnnnnnnnnnnnnnnnnnnnnnnnnnnnnnnnnnnnnnnnnnnnnnnnnnnnnnnnnnnnnnnnnnnnnnnnnnnnnnnnnnnnnnnnnnnnnnnnnnnnnnnnnnnnnnnnnnnnnnnnnnnnnnnnnnnnnnnnnnnnnnnnnnnnnnnnnnnnnnnnnnnnnnnnnnnnnnnnnnnnnnnnnnnnnnnnnnnnnnnnnnnnnnnnnnnnnnnnnnnnnnnnnnnnnnnnnnnnnnnnnnnnnnnnnnnnnnnnnnnnnnnnnnnnnnnnnnnnnnnnnnnnnnnnnnnnnnnnnnnnnnnnnnnnnnnnnnnnnnnnnnnnnnnnnnnnnnnnnnnnnnnnnnnnnnnnnnnnnnnnnnnnnnnnnnnnnnnnnnnnnnnnnnnnnnnnnnnnnnnnnnnnnnnnnnnnnnnnnnnnnnnnnnnnnnnnnnnnnnnnnnnnnnnnnnnnnnnnnnnnnnnnnnnnnnnnnnnnnnnnnnnnnnnnnnnnnnnnnnnnnnnnnnnnnnnnnnnnnnnnnnnnnnnnnnnnnnnnnnnnnnnnnnnnnnnnnnnnnnnnnnnnnnnnnnnnnnnnnnnnnnnnnnnnnnnnnnnnnnnnnnnnnnnnnnnnnnnnnnnnnnnnnnnnnnnnnnnnnnnnnnnnnnnnnnnnnnnnnnnnnnnnnnnnnnnnnnnnnnnnnnnnnnnnnnnnnnnnnnnnnnnnnnnnnnnnnnnnnnnnnnnnnnnnnnnnnnnnnnnnnnnnnnnnnnnnnnnnnnnnnnnnnnnnnnnnnnnnnnnnnnnnnnnnnnnnnnnnnnnnnnnnnnnnnnnnnnnnnnnnnnnnnnnnnnnnnnnnnnnnnnnnnnnnnnnnnnnnnnnnnnnnnnnnnnnnnnnnnnnnnnnnnnnnnnnnnnnnnnnnnnnnnnnnnnnnnnnnnnnnnnnnnnnnnnnnnnnnnnnnnnnnnnnnnnnnnnnnnnnnnnnnnnnnnnnnnnnnnnnnnnnnnnnnnnnnnnnnnnnnnnnnnnnnnnnnnnnnnnnnnnnnnnnnnnnnnnnnnnnnnnnnnnnnnnnnnnnnnnnnnnnnnnnnnnnnnnnnnnnnnnnnnnnnnnnnnnnnnnnnnnnnnnnnnnnnnnnnnnnnnnnnnnnnnnnnnnnnnnnnnnnnnnnnnnnnnnnnnnnnnnnnnnnnnnnnnnnnnnnnnnnnnnnnnnnnnnnnnnnnnnnnnnnnnnnnnnnnnnnnnnnnnnnnnnnnnnnnnnnnnnnnnnnnnnnnnnnnnnnnnnnnnnnnnnnnnnnnnnnnnnnnnnnnnnnnnnnnnnnnnnnnnnnnnnnnnnnnnnnnnnnnnnnnnnnnnnnnnnnnnnnnnnnnnnnnnnnnnnnnnnnnnnnnnnnnnnnnnnnnnnnnnnnnnnnnnnnnnnnnnnnnnnnnnnnnnnnnnnnnnnnnnnnnnnnnnnnnnnnnnnnnnnnnnnnnnnnnnnnnnnnnnnnnnnnnnnnnnnnnnnnnnnnnnnnnnnnnnnnnnnnnnnnnnnnnnnnnnnnnnnnnnnnnnnnnnnnnnnnnnnnnnnnnnnnnnnnnnnnnnnnnnnnnnnnnnnnnnnnnnnnnnnnnnnnnnnnnnnnnnnnnnnnnnnnnnnnnnnnnnnnnnnnnnnnnnnnnnnnnnnnnnnnnnnnnnnnnnnnnnnnnnnnnnnnnnnnnnnnnnnnnnnnnnnnnnnnnnnnnnnnnnnnnnnnnnnnnnnnnnnnnnnnnnnnnnnnnnnnnnnnnnnnnnnnnnnnnnnnnnnnnnnnnnnnnnnnnnnnnnnnnnnnnnnnnnnnnnnnnnnnnnnnnnnnnnnnnnnnnnnnnnnnnnnnnnnnnnnnnnnnnnnnnnnnnnnnnnnnnnnnnnnnnnnnnnnnnnnnnnnnnnnnnnnnnnnnnnnnnnnnnnnnnnnnnnnnnnnnnnnnnnnnnnnnnnnnnnnnnnnnnnnnnnnnnnnnnnnnnnnnnnnnnnnnnnnnnnnnnnnnnnnnnnnnnnnnnnnnnnnnnnnnnnnnnnnnnnnnnnnnnnnnnnnnnnnnnnnnnnnnnnnnnnnnnnnnnnnnnnnnnnnnnnnnnnnnnnnnnnnnnnnnnnnnnnnnnnnnnnnnnnnnnnnnnnnnnnnnnnnnnnnnnnnnnnnnnnnnnnnnnnnnnnnnnnnnnnnnnnnnnnnnnnnnnnnnnnnnnnnnnnnnnnnnnnnnnnnnnnnnnnnnnnnnnnnnnnnnnnnnnnnnnnnnnnnnnnnnnnnnnnnnnnnnnnnnnnnnnnnnnnnnnnnnnnnnnnnnnnnnnnnnnnnnnnnnnnnnnnnnnnnnnnnnnnnnnnnnnnnnnnnnnnnnnnnnnnnnnnnnnnnnnnnnnnnnnnnnnnnnnnnnnnnnnnnnnnnnnnnnnnnnnnnnnnnnnnnnnnnnnnnnnnnnnnnnnnnnnnnnnnnnnnnnnnnnnnnnnnnnnnnnnnnnnnnnnnnnnnnnnnnnnnnnnnnnnnnnnnnnnnnnnnnnnnnnnnnnnnnnnnnnnnnnnnnnnnnnnnnnnnnnnnnnnnnnnnnnnnnnnnnnnnnnnnnnnnnnnnnnnnnnnnnnnnnnnnnnnnnnnnnnnnnnnnnnnnnnnnnnnnnnnnnnnnnnnnnnnnnnnnnnnnnnnnnnnnnnnnnnnnnnnnnnnnnnnnnnnnnnnnnnnnnnnnnnnnnnnnnnnnnnnnnnnnnnnnnnnnnnnnnnnnnnnnnnnnnnnnnnnnnnnnnnnnnnnnnnnnnnnnnnnnnnnnnnnnnnnnnnnnnnnnnnnnnnnnnnnnnnnnnnnnnnnnnnnnnnnnnnnnnnnnnnnnnnnnnnnnnnnnnnnnnnnnnnnnnnnnnnnnnnnnnnnnnnnnnnnnnnnnnnnnnnnnnnnnnnnnnnnnnnnnnnnnnnnnnnnnnnnnnnnnnnnnnnnnnnnnnnnnnnnnnnnnnnnnnnnnnnnnnnnnnnnnnnnnnnnnnnnnnnnnnnnnnnnnnnnnnnnnnnnnnnnnnnnnnnnnnnnnnnnnnnnnnnnnnnnnnnnnnnnnnnnnnnnnnnnnnnnnnnnnnnnnnnnnnnnnnnnnnnnnnnnnnnnnnnnnnnnnnnnnnnnnnnnnnnnnnnnnnnnnnnnnnnnnnnnnnnnnnnnnnnnnnnnnnnnnnnnnnnnnnnnnnnnnnnnnnnnnnnnnnnnnnnnnnnnnnnnnnnnnnnnnnnnnnnnnnnnnnnnnnnnnnnnnnnnnnnnnnnnnnnnnnnnnnnnnnnnnnnnnnnnnnnnnnnnnnnnnnnnnnnnnnnnnnnnnnnnnnnnnnnnnnnnnnnnnnnnnnnnnnnnnnnnnnnnnnnnnnnnnnnnnnnnnnnnnnnnnnnnnnnnnnnnnnnnnnnnnnnnnnnnnnnnnnnnnnnnnnnnnnnnnnnnnnnnnnnnnnnnnnnnnnnnnnnnnnnnnnnnnnnnnnnnnnnnnnnnnnnnnnnnnnnnnnnnnnnnnnnnnnnnnnnnnnnnnnnnnnnnnnnnnnnnnnnnnnnnnnnnnnnnnnnnnnnnnnnnnnnnnnnnnnnnnnnnnnnnnnnnnnnnnnnnnnnnnnnnnnnnnnnnnnnnnnnnnnnnnnnnnnnnnnnnnnnnnnnnnnnnnnnnnnnnnnnnnnnnnnnnnnnnnnnnnnnnnnnnnnnnnnnnnnnnnnnnnnnnnnnnnnnnnnnnnnnnnnnnnnnnnnnnnnnnnnnnnnnnnnnnnnnnnnnnnnnntcatttgttgtgatatgtgttttattgtggtggtctggaactgaacctgcaatatatttgaggaatgtctgtaacacgaagtgggcggcttaatacaacagaagtttttggagttccattctagagactggaaatccaaaatcaaggttttgggagggccacgctccctctgaatcctgtagggaaggatccttcattgcatcttccagcttctggagccacaggccttccttggcatgtggcagcagaactccaatttctgtctctgtcctcatatggccatcttccctctgggtctgtgtcctcatatgctgttctctctgtgcatgtctgtttccaaagttttcccttttaataaggacaccagtcacactggattagggcctactttcatgacctcaccttaacttgattgcgtctgcaaagattgtatttccaaataagatcacatccacagggactggaggttaagacttcagcatacttggggggagacacaattcaacctataacagagcccctttgaaaatgtcaggcatcaggtgctcacagcacacggtccagctgttggtgctcacccttgctcagcacacggtggaggctctgcctcaatctcattcttcatgggaacagctaagccaggtagcgaatacgggttatgtttgtgtcaccacaacagacactgaaaggaagtttgtggtgtccagcacacttgccagcataggcctcacagaccacagcacctagaatctgacaaaaattagaataaatccgatgtctccttttctctcttttttttaagcatttttaaatgcaattggtaaatttcctgactgtaccctcctcatcttgcattgctgaataagtgaggaacctctctatggcatgaagcagaaaaccattgagcttatgagaagaaacaggaaatacatgtaaaagagaccagtctgaaaaatcaggagaaattttacaaaagagatttactgccaagaaaccagggaaactttcagaacactctccttttcatatttgtaacaagattcaattgtacaaatacttctgtgaaactagccatgaagtgtgtacatgaatgaatatatgtattcagtgtgtttatatatttcatttcatacatgtgatctatatcatatatatatatcacaatgaatattgcagaaaattaaagcaaagagtaagaagagttaaccaaatgttccctgaatgcagtgagaaaagatgaaaaggagaagacaggcaagcacagtggctcacatatgtaatcccaacacactgagaggctgaggcaagagtatcacttgagcccaggagctcaagaccagcctagacaacatggcaaaaacccatctctacaaaaaagtataaaaattagctgggcatggcagcatatgcctgtagtcacagctaggcaggagactaaagtgggaggatcacctgagcccaggaggctgaggcttcagtgagccttgatggcaacctgcactccagcctggatgacagaatgagaccctgtctcaaaaaaggaaaaagagaagacatatgtaacacagtgtcaggattcaaaatacatgtagcaaaaattccagaagggtaagcaaataagcccatacctagccatcactagggaaacttctgtgtttcagggatagagaaaaaaactctgattccagaaataaaatgtgaaaatataatacccgcaaaagaaataagtttattgacaccacattgattctatacaacactaaattgtagaagatagcatttctcttgagccaagctaatattcacacctagaggctccagatacacattaaaggataagaaagacacaaaaattgtaccatttaagtatgtttcccaggtaattcataagcaaatttttaaaaaggagaatgatgaattccaaaggaaatctcaatgagataggatattggtaaaaagaaaaaacaacaataaaaaaatacacacaaaaactcggcaatgtaatcataatttactaataatctctctaaactcatagaacatatcaataaaactagaaaatgtgagacagcaagaaaaggtaggctaaacttacattacagaaaagatgagtagactgactatatagagtttgactctaaaattgagaaaataggtttaaatatctgttgtgtgcatatccatgtgtgtaatatacatgcacatatataaaatgaaattcctcattagaaaaaataataagtttaatttccaaattattagaataactaaaacagctgaatctatctcttccatatagcaagtgagagggaaagaaaaggaaagacaaggaatgcatttgtctcttccaccagaaataagccccctcatttttgggtcaggtcattttattcattgctttctccacatcctcatcattgggcatcatgaaatcaatgaaaaaggcagtgaaagaatgatgatgaaagcaaatcaaatgtatcatttatctcaatacatttggtttaatcctcttgttgaaaaacaaagtctcttagacaagatcaaaagcaacaaatcttgtatttataaaaaacatgtctcaagtaaaatgacatagtattatacacacacacacacacacacacacacacacacaaattaagtgaaaatgcaaacaaaaaaaggcaaaaataatatttagagaaagatagaatttaagaaaaaaattgtcaaactggtctacaaaataattgttttattttcgtgccagttgcagtccacagtgaagccaagatattaagaagcaatgtgggccaggagaagttagagcagaaatatctctttcaataatgaaagaataagaaaaagaaatagaagagctggaaacaataggtaaagtttaggctaggccttagacttctcctgcattgtaatccttctggtttgccacatatgcatgctgtcaggaagttgatgaggtatgtacaggacaatgattttccattttttgcctttaggcaccgactcattggtcactcatctgctgaatgtatcctctcaggcaatactgcccattggagcacgaagccgccaatttgtcaacgtgagttgaaatctctttccccattcaccccaccattgaatcctagagttgtcctcctagaattacaaagaatggatctcatccctcttggaaatggtatccttctgatatttgaagaatctagtcatatccttaaaatggctcacagcattccaaacttccgccttcacctagaaatgcttttttttttcttatctcagtctaatgtattttaaactagtctttagctcatttaaccagcccccaatgtcctcttctgttggttgagcacctcgcagtttgaagagcattttgtttagtgaagtcaacaaatacaaagtcagtgaaagaaaccccatatcctctctgcaagctcttagtatcacatcagatattcaagccatgcagctctttcttccttcttattctttgtctaaacaggatcatgccatcttccctgtgagttgtttggaagatgagctttctacattttggggagcaaagacgaatgagcaattgcaagctaacagggaatataaaatgtgtataatcctgggtttagtgatggtgtgaggaaatcagcaatttcaaacccagttggtggcaggataagtgggaacaaactttgtagaaggccaataaactggctgggcactgccctacagtagagtaggacacagtattcagttcttccaagatcagacgagattgggcgcattcagggtggtatggctgtaaatcagtatccagttctttttattacttctgaatctgtaagtatcatgtttattatatgtaatattgtatatttgtgctttgtctttattagttcttccagagcttttgttcttattatttaataaagatgttatactgagccacgtgtggtgactcaaacttgtaatcccagcactttgggaggcctaggtgagcagatggctttagcccaggagtttgagaccagcctgtacaacatggtgaaatcatgtctctacaaaaaatacaaaaactaaacaggcacggtggcacatgcctgtagtcccaactactcgggagactgagaggtgggaggattgcttgagccagagaggtcgaggctgcaatgagccatgatcgtgccactgcactccagcccgggcagcagagccagaccttgtctcaaaaaaaaatgctatgctgtatgctttattatattaatatccaataccataaaggcaaatgccttctatatagagagaactagattaataatggtgagataacatagttaaattctcgtttagcaggagaaataaaaacatagactataggctaggcacagtggctcatgcctgtactcccagcacattaggaggctgaggtgggcagatcacttgaggtcaggagttcgagaccagcctggccaacatggtgaaaccccatctctactaaaaatacaaaagttagccgagtttggtggcgcatgcctgtaatcccagctactcaggaggctgaggcaggaaaatcgcttgaacctgggaggcgggggttgcagtgagctgagatcacgccactgcactccagcgtggggaacagagtgaggatctgttaaaacaaacaaacaaacaaaaaaaaaacacatggactctaataatacatggatacatttagtgaaataaggttaactgagtagagcagcactcataacattttaaaactataagaacatgtctgtacattagcaaatattagatgagaataatattgtcaatatttacttctggtaatttgaaattaaaaaacaaaactgttagcaaaatttacaataaagtataattattagaaaccaggctgggcacggtggctcacgcttataatcccagcactttgaaaggccgaggcaggcggattgtttgaggccaggagttcaagactagcctgcccaacatggccaaaccccatctctactaaaaatacaaaaataaaccagacatggtggtgcatgcctgtgatcccagctactcgggaggttgaggtgggaggattgcttgacctgggaagtagaggttgcagttagccatgattgtgccactgcactccagcctgggtgacagcaagactctgtcccaaggttttgttttggttaacttgctgtctcttttccaggaattccttgtgggctacccccaaccatcgccaatggagatttcattagcaccaacagagagaattttcactatggatcagtggtgacctaccgctgcaatcttggaagcagagggagaaaggtgtttgagcttgtgggtgagccctccatatactgcaccagcaatgacgatcaagtgggcatctggagcggccccgcccctcagtgcattatacctaacaaatgcacgcctccaaatgtggaaaatggaatattggtatctgacaacagaagcttattttccttaaatgaagttgtggagtttaggtgtcagcctggctttgtcatgaaaggaccccgccgtgtgaagtgccaggccctgaacaaatgggagccagagttaccaagctgctccaggggtgagtctgactgatgcctagaagggccctgccagtgacatgtgttgctgttggatcaggagatgagtatttgttaagggggaggtatgtatggtgaggagggtgggaaagtaagttttgggggaagaagcatgaaattaagaattgggggtgtgcatgcacccatgcatatgtgtcttcatttggaaagcaagaccttaattagccaagaaaaaagctattttggactcacctattatttgattctcagggcaaagtaccagctgcaatctctctcaagtatattgaaaaattatatggactttctctatgatcagctatgtgctaagcactttatatgcattttctcattcattatttacaacaacactttgaaattgtgctattgtattatccatttaatagtgacatcagcttgatctttcagaggttaaataaattagctaagtcacatgttctaagcgagacacccaggattttaaaatgcaagtgtatcagaccccagagtctgaatgttttggctcttgccatactttcatcagtatccattgctgaaagaaagagactggcttacaaagacagaaatcatagcctcagaatagacaaagaccttagagtttgtctataatggtctgcctcctacattttattttgattttattttatttaaaaactatttattagagttgacgtcccactctgttgcccaggctgaagtacagtgatacaatcatggctcactgcagcctcagattcctaggctcaagccatccacgtcctacattttatccctaggagtctaagtcaagagtgaaagtaacttgttcaaagtcagttaaatatttctaaattcatgtttaatgaggtatagattaggttgatgttaaaatgggttctgatgccctaagcatgaacgaacaggactataaataaaggcagatgttgagtcaaatactctccaaataatatgccctctcgtgacaaaggactgtcttatttaagggcttgtgtttttgatggctcatcttgtctactgatgccacaatagctggcttagcagctgtgtaggaggtgttatggttgatacatagggacagagaaggagcttacgattcttctaccaacccatgttagccttgtgcaaccactgagctgggaagatgaacagataaagggatataaagacggatgtactgaggcaggagatgggcagggcttgtgttctggtcacaatcctgctgaccaaaacaggctctggcccagacaggatgaagtgaaaaaacagcaggaaccagcagatggcgatgaaagcaattgctagctgccctcatagtcccatcagcaccatgacagtttacaaatgccatggcaacgacctagaagttaccgcccctttcctggaaagttctaaataactcgcccctcaatctgcattgatccactccttaatttacatgtaactgaaatgggtttacagcagtataaacacagttgcctgccaggaacccttatgttgctgactctgggtgtgctgcctgtgagttagccctgctctgcaagaagcagtgcctttcactaacagattgctgtctagcaccactggctcatccttgaattctgtcctggatgaggcaagaacccttccagagtaagccccaatttaggggcatgcctgtcccgaaacagtatgactgtactttagtcattggtgtgcaatcagagaaattgggggaaatctgtaaaacagatttggtctcaggtgacagtctcattacctgaataacaatggtacaaatcgggattaccttcctaggaaatatgtagatggagaatccaccaatactgataacttcacattggatagccagagctaggagaaaatacctcatgccctgtagatttacaagtgaatttggggccttgtgctagggagaattgggttctatttctctacctctgactagctatgaggtcttcaggaagcataggaaattcccccataactaacaagtactctggaactgtcctttccacagtgtgtcagccgcctccagaaatcctgcatggtgagcataccccaagccatcaggacaacttttcacctgggcaggaagtgttctacagctgtgagcctggctatgacctcagaggggctgcgtctctgcactgcacaccccagggagactggagccctgaagccccgagatgtgcaggtgcctcaactctctggcttccagatttctctctttaccccacacatggaggtcttactcctattttttcttttttttttttttcttcttctagtgaaatcctgtgatgacttcttgggtcaactccctcatggccgtgtgctatttccacttaatctccagcttggggcaaaggtgtcctttgtctgtgatgaagggtaagtgtgacccagaattcagatcagggactcagcactgcagagtgactcttgagcttaaggatcaatccaaaaagagggctgacctaggagaagaagaatccagggagattaacctctggaagtgtagctttaaaataaaggtagggactaagtggcactactatcaggagataaagagataaagaaaaaatggcgcatataactgagtgtcaagtacaaacagaaatacagtcaccagtccagaaaaggggaccaacctggtggaaaagaagtactagaggagactaatatctgaaacaatgattggaaagtgtggtatgaaccagctggatccatgaacagaagtttaaaaagcaaaaagctcaactcatttgatttctcacttatagaggctcagaagtaaaatcattttggaaaacgtgcagcttccagtaaggcacaaaggaaaaacaatggccgaaatacaaaagatcttgaaaaaaaaagtgtgtatatatatgtatacatacgtatacatatggacacgtatatgtatacgtatacatgtacatgtgtatacatatgtgtatacatggacacgtatatgtagacgtatacatatggacacgtatatgtagacgtatacatatggacacgtatatgtagacgtatacatatggacacgtatatgtatacgtatacatatggacacgtatatgtatacgtatacatgtacatgtgtatatgtatacgtatacatgtccatatgtatacgtatatgtatacatatgtatatatacatatgtatatacatatatatggaacatatgtatatatacatatgtatatacatatatacatggaacattagatgtatgaataaataataatttgcagacatgaagagataaataaatattctaggggttgttaagaaaagtttgatatataagagaaagttgtatataagataaaataacatgcaaagattatttcacaaaacttttaatcaaataaatagtggaatttggaataggaacgaaagagtaagtagaaatattctaaattccaattacatgtgattgacagctctgccagctattattgctttgtcctcactgaaagctacactttttccaaaatgatttggcttctgagcccgtcaatgagaaactaagtgagttgagtgttttcacctgtgctttagcttgagcagtaaaatgttaattaacttaggaattctcagggaggaggttgagatctgtcacgaagggaagagagaaatggtgcattcatccagccactactgctttgttctttaggtttcgcttaaagggcagttccgttagtcattgtgtcttggttggaatgagaagcctttggaataacagtgttcctgtgtgtgaacgtgagtagatggaatacttgttcagtctggatctttctgtttttttcttaatatagtttgccccatgggattatctattgtttgtcccgctgtttgtgcccgcttttgatagaaattgttctttgttggaatagatacaagcaatgttttggggaaaaataaacatgagaatcatgtgttttgggtaccatcctataaatatttatgaggagagtctgtgctataaatagagagaaatgcttcatagaaataaatgtatggcaagatgctaggctaaatttttctcttctttcctgtcaaaagtaatagtcatacttcaacttttcagttcttccctcaatcatccatttagtcatatactcattctttcaacagaaaattatttgagcacctactatgtgccaagcaatcttctgggaactggggatatacctataaacaagacagataagtccatgtttaagtttttgtgcaaggataaagacaaaaatcaaagacatgaatagaaatgttcaaatgatactaagtgttattaagaaaatgctcttaattgagtcagtgctgtcaattgagaatgtagctgaggacccaaaaggcaagtgtagcccagcaaacctctgggtgtagctgagggttcaaaatgggaggctgttgcagcaatctaatcagagatgttggcccaggatagcaattgggaaaggtgatgatgagaagtgatcaaattctggatatattttgaaggtgcagatgacaggatttggtgatggttagcttagatagagggtgtgaaagaaagagaagaaacatagccagtttccaggtttttggccagagcaaccgccagggtagaatttcccttagctgaaatgcaggggactgcatgaagtttgggaatgggggaaatcaaaagttaagcttgggacataactttagtgttcctcttagatatccagatggatatgttggagagtcccaggctgcccatagatatgtagaagccatcattgtatctgctatgcttgaaatcaggactgaaagagatcttcacctagggagtgagtgctgctagagaacagatgcatggactgagcctggatgtccaggattaagagttgcaaaggtgagaaggaatcagcaaaggggattatgatgaagcagccactgcagtaagagaaaacacaggagggtgaggtgccctggaagccaagtatggaaattattttaagggattagactaatcaactgtgtcaaattctatagagaggtcaaattaggtgagaacagaaaattgatctttgggtttagcaacttggaggtaacaagtggaagtttcagtggagtgctggcaaacactgattggaatgaattctagggagaatgaatgggaggaactgtaacagatcatagacaatattttagaggagttttcatgtaaagagagtagaaataggactatagctgaagagggaaatgacagcaagaggtttgcttttgatttttaagagggcagaaaatagtgtgttaaaaacagaaacactactatgtcccatctatccatttacttcttcactaaatcaatcagggtattgcttccccttctgatcatagctattaaaaatacatgtttacaatagaattttgctcatatgaatactttgccttaaatcatttcaatgtcttgtattgatttatatgatgaaaatgataatttcatcttacattgttggaagtcagctatttgacaatcttaacttccctggaatagttaagaagtatgaaagaaaagaaaaagaaaataccctcatgaacccaacatatacctgaaatcgcttactagagtgtaaacattggttaagctattttaacctttgattagtttatctataattcttttaagctgtaatatcctcttcccaaattcaaagcaaattagaaaagggaaggagtgtccccaaatagaggcattccaaggaataaatgtgtttctttaatgaaaaaaataaataaataaacccttaaaaaccaatgagtatctcaaaaaaccgtaacattcttgagccttttgaaacacatacaggagtacatagcatttttttttcattgtgacagcattactgcaatctttcatctgtattttgaaaatcatagcctggcatcatcaagaaaaattaaatcactgatatacaaataataaatgtataatatattttagaaagatgtctctaggatgaagactcttgatgtcaaagatcatatttatcctgtgctttaaacagtacttgacatacagcagatattcaaaaacatgcttgttgaattaatggatgattcccctttaatgtgactgtgaagatttttatttactttaaaggaatatactctttattattcagaaatattaactatctgaaaaatttaggatgcttaatttgggaaaggcttttgtaataaacattgatttagttgtcatttcatttagctccatcttagcagaggcctaatacatttattttgcagtttctactttccttaagaagaaaagtacgcttaattggcaacacagtcacagtatgacaactgtagaatcgccttggattatactttaaaattttttatggaattgagagctcttgttttctttctagatatcttttgtccaaatcctccagctatccttaatgggagacacacaggaactccctctggagatattccctatggaaaagaaatatcttacacatgtgacccccacccagacagagggatgaccttcaacctcattggggagagcaccatccgctgcacaagtgaccctcatgggaatggggtttggagcagccctgcccctcgctgtgaactttctgttcgtgctggtcagtatccgcttccacatatcctaaatgggttcagaatatgtggacccaatccctcatgtttctgtaataagactatggtatttgtttgtgagcttaactttgtcataagtgtaaatgtcaaaattacataccatagctaaaacagatgggtttcagcagcgccaaggtatgtttgaatctataagatgaaaactcttcttgctggtggagtggaagagggtgggaaaaagggactgagggaggggtggagggaaggcagtaaggcacagttatgtaaatcaggaagaaaaatgtattcactggagacgacatgaaaacaactgcctctgaacactaaccagtatctgtataattgacagtctccataagttcatgaggggtacatgggcatgcaaagttcaaaattggaaatgtggatattatttagctaaggttttaaactagtgttctgctgcatgggctaagtaaccaaaaagactctctttgtcttgacttaaagtttgtccacttgtcatcttgcctccaggctgtcttaatctttgtacttgaactgttccactcagggggtaagaagcaaggaaagagtagcccaaagaaaagagtaggaaaaggaagaggctatttcttcctaaggaggggaagaagttgcctggtccttcagggcaaacattaggccttttccagagcagaaactggagtagattagggatgtggcaccagccttggaatattccattatccacagggaagccctgagagacaagagccagccaaggtgaaaagactaaacctgatgaaaggcatttaacctttctttgacctttactctccaactgagtggtacccatcagaatgcagtaaatttttttaatgtaaatgcctagaccccagtgcaggcttaatgaacagatggaggaagccttctccaaaaaggaggtaatggagttcagactctatttgaaaatatgcagcacatggctgggcacagtagctcacacctataatcccagcactttggaggccgaggtgagaggattgtttgaggccaggagttcaagaccaacctggccaacacagcaagctcctaactctacaaaaaataagactgaaaaattgtaaaaactgtaaaacaaaaaaagtaaaaatatgcagcacacaatatactctctcagaaagaagacatagcttcttacagaaggctgatggcttagtctgttttgttctggttctttttttgttttgttttgtgtgtgtgtgtgtgtgtgtgtgctttttttgagagagagggtcttactcttttgcccaggtggagtagagtggtgcaatcatagtttactgcagccttgacctccctggctcaagcaagcctcccatctcagcctgccaagtaggtgggaccacaggtgcatgccaccacacccagctaattcttgtattttatgtagaccggttttcatcatgttgcccaggctggtcttgaactcctgggctaaagcaatccacctgccttggcctcccaaagtgctgggactacaaggcgtgagccaccatgcccagcctattttgttctatctttaaatgcctggtttagcatcagaagaaaaacactgtattagtttcctagggctgctgtaacaaattaccacaaactaggtggcttaaaacaaaagaaacttattatttcacagttttgtaggctgaaattgagatgttggcagaggtattttcccatcttctaaggctctggaaaataaccaattctttacttcttccatctgctgctggttcctgggattccttggcattccttggtttgtggatgcatcattcaaatccctgcctccatcatagccttttcccctgtgtctctatatgtcaaatccctccactttttccctgatagggacaccagtcattggatttagggcccactctaaataaaagatgatctaatctcaagaacctaatcttaattctatctgaaaaaccattattccaaataagtttctattctgaggttttaggtagagatatcttttgggagaacatcattcaactcactacaaggggtacctgctatgaaaggccagagaggcagcttatgatgggcaccctgagaatggagtatggagagagatgataaaatatgtcttgctactcatgagtgaattagcacaaacacatgaagatttgagtggttaactgaggatataggcactccgataggaggtcagaatgtgaaactacaagctgaagttcttgctttggtgaaataagggaagaaagatcagaaagctgagtggtcttccaaatagtaaaaaaaatcctgctgagtagatgcattgaagagcttcatcccaaggtaacatcaaggagaagaaaatcttttgctattcttgtaagtctctttgtttctgtgatccacctatcagcttaattgaagagaaagaggaggtagggtggaagtctctctgctaactttgatattcctgtggtttttctctccaggtcactgtaaaaccccagagcagtttccatttgccagtcctacgatcccaattaatgactttgagtttccagtcgggacatctttgaattatgaatgccgtcctgggtattttgggaaaatgttctctatctcctgcctagaaaacttggtctggtcaagtgttgaagacaactgtagacgtgagtaacccctccctgggaactacttcatgtctgttaaagcataggtgggaccgggcttggtggctcacgcctgtaatcccatcactttgggaggccaaggctggcagatagcttgaactcaggagttcgcaaccagcctgggcaacatggccaaaccccacgtctacaaacaacaacaacaaaaacaacgtaggtgggatttgattcaatttgctcaaattttggaagcaagatgtctatatttgcccaagatattttgataaaggaaaggatggtcttgtacatcaccccttcttcttgcttgtagttcctgaaccttgactagatgctcatttcatgagaatggctctcacaaaagaattagagagaaaatttacattcactgtagatcatccttgatggctgacaccattaaatgaatgaaacaggggtacaaaagaaatttatgtgagttgcagtgaactgtgcttggctaactaaaaataggggagacatcccaaattttgaggcctttgattttggctggcggaatgagagtacaacactttagccataaatgacttgttttgtttttgttttgtttctgctgttgctgttgtgttttttgtttgtttgtttgtttgtttctgagatggagccttactctgtcacccaggccggagtgtagtggcgcgatcttggctgcaacctcctgggttcgagcaagtctccctgcctcagcctctcgagtaactgggattacaggcacccactcccatgcccagctaatttttgtattttttagtagagatggggttttgccacgttggccaggctggtcttgaactcctgacctcaggtgatctgccggcctcggcctcccaaagtgctaggattacaggcgagagcccatacataacctttattaggaggtgcaagatagtctttttcaaagttgtgttcgtagctacatgattctgaagttgtctgccaagtttcctcaaagcagtcaattccatgaaacaattggaactgtatatgctgtttagtatgccacactccagtctgaaccttacaaaggtaagttgaactctatatttaatcccaaattctgcttcttcccctaggaaaatcatgtggacctccaccagaacccttcaatggaatggtgcatataaacacagatacacagtttggatcaacagttaattattcttgtaatgaagggtgagttgagaataccatctcttgaatatgagttccagaacagcagagccaacttctgacccagtctcagatagacaaactaaactattgctccctttactttaaaagcaagcaataggacttatagatggagatgatacgttggacatagccatatgatcaaaggaatacaaaaaagaaggtacaatatgtattgtattgtaaaccagaggagggcaacatgttcctgtcaaaggtggtacatgtgaaacctggtcaggcattcattggatgaaaaggagcagcttacaaataaggaaaaggaaaaaaggtagttgaaccatgtaaacctccttaactgagatcagtaggtaatacagttgagttggaggaccctgaagcagagtttgggagggtaaacattaattgtaacagcagctctggaagagtatgcatcaaagtgcacacagagaggagacattatggggttcttgctcttgacttctccttgggacaagtagccacaccaaaagccattgcctcaactgagaaggggcttttaaaaactctggagtggacctccatcaaactccagcagacctgcagcagaggggcctgactgttagaagataaactaacaaacataaaggaatagcatcaacattaacaaaaaggacgtccacatgaaaaccccatccaaaggtcaccaacatcaaagaccaatgatagataaatccacgaagatgaggaaaaaccagcacaaaaaggctgaaaattcccgaaaccagaatgcctcttctcctccaaaggatcacaactccttgccagcaagagaacaaaactgggtggagaatgagtgagttggacagattgacagaagtaggcttcagaaggtgggtaataacaaactcctctgagctaaaggagcatgttctaacccaatgcaaggaagcgaagaaccttgaaaaacaggttagaggaattactaactagaataaccagtttagaaaagaacataaatgacctgatggagctgaaaaacacagcacaagaacttcatgaagcatacacaagtatcaatagccgaatcgatcaagtgaaacaaaggatatcagagattgaagatcaacttaatgaaataaagcatgaagacaaaaaaagaatgaaaaggaatgaacaaagcctccaagaaatatgggactatgtgaaaagaccaaacctacgtttgattggtgtacctgaaagtgacggggagaatggaaccaagttggaaaacactcttcaagatattatccaggagaactgccccaacctagcaagacagtccagcattcaaattcaggaaatacagagaacaccacaaagatactccttgagaagagcaaccccaagacacgtaattgtcagattcaccaaggttgaaatgaaggaaaaaaatgttaagggcagccagagagaaaggtcgggttacctacaaagggaagcccatcagactaacagtgaatctctctgcagaaaccctacaagccagaagagagtgggggccaatattcaacattcttaaagaaaagaattttcaacccagaatttcatatctagccaaactaagcttcataagtgaaggagaaataaaatcctttacagacaagcaaatgctgagggattttgtcaccaccagacttgccttacaagggctcctgaaggaagcactaaacatggaaaggaataactggtaccagccactgcaaaaacataccaaattgtaaagaccatcaacaatatgaagaaaccacatcaactaatgggcaaaataacaaatcagcatcataatgacaggatcaaatttacacataacaattctaacattaaatgtaaattggctaaatgcccccagttaaaagacactgactggcaaattggataaagagtcaagacccattggtgtgctgtattcaggagacccatctcatgtgcaaagacacacataggcgcaaaataaagggatggaggaatatttaccaagcaaatggaaagcaaataaaagcaggggttacagtcctagtctctgataaaacatactttaaaccaacgaagatcaaaagagacaagagcattacataatggcaaaggatgcaacaagaagagctaactatcctaaatatatatgcacccaatacaggagcacccagattcataaagcaagttctgaaagatctataaagagacttagattcccacacaataatagtgggagactttaacaccccactgtcagtattagacaggtcaacgagacagaaaattaacaaggatattcaggacctgaactcagctctggaccaagcagacctaatagacatctatagaactctccaccccaaatcagcagaatatacattcttctcagcaccacatagcaattattctaaaattgaccacataattggaagtaaagcactcctcaaaatgcaaaagaatggaaatcataacaaacagtctctcagaccacagtacaatcaaattagaactcaggattaagaaactctctcaaaactgcacaactacatggaaactgaacagcctgctctgaatgactactgggtaaataacgaaatgaaagcagaaataagtaagttctttgaaaccgatgaaaacaaagacacaatgtaccagaatctctgggacacagccaaagagtgtttagagcactaaatttatagcactaaatgcccacaggagaaagcagaaaagatctaaaatcgacgccctgacatcgcaattaaagaactagagaagcaagagcaaacaaattcaaaagctagcagaagagaagaaataactaagatcagagcagaactgaaggagatagagaaacaaaaaacccttcaaaaaatcaatgaatccaggagctggttttttgaaaagattaacaaaatagaccactagccagactaataaagaaaaagagagaagaatcaaatagacacaataaaaaatgataaaggggatatcaccactgatcccacagaaatacaaactaccatcagagaatactataaacacctctacgcaaataaactagaaaatctagaagaaatggataaattcctggatacatacaacctcccaagactaaaacaggaagaagtcgaatccctgaataggccaaaaacaagttctgaaattgaggaagtaattaatagcctaccaaccaaaaaaagcccaggaacagatggattcatagctgaatcctaccagaggtacaaagaggagctggtaccattccttctaaactattccaaacaatagaaaaagagggactcctccctaactcattttatgaggccagcatcatcctgataccaaaacctggcagagacacaataaaaaaggaaaatttcaggccaatatccctgatgaacattgatgcaaaaatcctcaataaaatactggcaaacaaaattcagcagcacatcaaaaagcttatccacaacgatcaagctggcttcatccctgagatacaaggctggttcaacatacgcaaatcaataaacgtaatccatcacattaacagaaccaatgataaaaaccacatgattatctcaatagatgcagacaagggcttcgataaaattcaacagcccttcatgctaaaaactctcaataaactaggtattgatggaatatgtcccaaaataataggagctatttataacaaacccaccactaatatcatactgaatgggcaaatgctggaagcatgcgctttgaaaaccagcacaagacaaggatgccctctctcaccactcctattcaacatagtattggaagctctggccagggcaatcaggcaagagaaaggaataaagggtattcaaataggaagagaggaagtcaaattgtctctgtttgcatatgacatgactgtatatttagaaaaccccattatctcagcttaaaatatccgtaatctgataagcaacttcagcaaagtctcaggatacaaaatcaatgcaaaaatcacaagcattcctatacaccaataatagacaaacagagagccaaatcatgagtgaactcccattctaaattcctgcaaagtgaataaactaccttggaatacaacttacaagggaagtgaaggacatcttcaaggagaactacaaaccactgctcaaggaagtaagcgaggacacaaacaaatgaaaaaaacatttcacgattgtggataggaagaatcaatatcatgaaaatggccatactgcccaaggtaatttatacagtcaatgctatccccatcaaattaccaatggctttcttcacagaattacaaaaaaaaaaaaaaaaaaaactactttaaacttcatatggaaccaaaaaatagcccatatagccaagacaatcctaagcaaaaagaacaaagctggaggcaccacgctacatgacttcaaactatactataaggctacagtaagcaaaacagcatcgtactggtaccaaaacagatatatagaccaatggaacagaacagaggcctcagaaataatgccacacatctacaaccatctgatctttgatgaacctgacaaaaacaagcaatggggaaaggattccctatttaataaatggtgttgggaaaactggctagccagatgcagaaaactgaagctggaccccttcctttacaccttatacaaaaactaactcaagatgtattaaagacttaaatgtaagacctaaaactataaaaaccctagaagaaaacctaggcaataccattcaggacataggcatgggcaaagacttcattactaaaacaccaaaagcaatggtaacaaaaaccaaaattgacaaatgggatctaatgaaactaaagagcttctgcacagcaagagaaactatcatcagagtgaacagacaacctacagaatgggagaaaatttttgcaatccatccatatgacaaaggactaatatccagaatctacaaggaacttaaacaaatttacaagaaaaaacaaccctatcgaaaagagggcaaaggatatgaacagacatttctcaaaagaagacatttatgcagccaacaaacatgaaaaaaagctcatcatcactggtcattagagaaatgcaaatcaaaaccacattgagataccatcttgggccagttagaatggcaatcactaaaaagtcaggaaacaacagatgctggagaggatgtggagaaatagaaatgcttttacactgttggtgggagtgtaaattcgttcaaccattgtggatgacagtgtggtgattcctcaaggatctagaaccagaaataccatttgacccagcaatcccattactgagtatatacccaaaggattataaatcatccttctataaagacacatgcacacgtatgtttattgcagcactgttcacaatagcaaagacttggaaccaacccaaatgcccatcaatgatagactggataaagaaaatgtggcacatatacaccatggaatactatgcagccataaaaaaggatgagttcatgtcctttgcagggacatttatgaagctagaaaccatcattctcagcaaactaacacaagaacagaaaaccaaccaccgcatgttctcattcctaagtgggagttgaacaatgagaacacatggacacaccgaggggaacatcacacagtggggcccgtcagagggtaggagtccaggggagggatagcattaggagaaatagccaatgtagatgatgggttgatggtgcagcaaaccaccatgacatgtgtatacctatgtaacaaacctgcacgtcctgcacatgtatcccagaatttaaagtatgataataaaaaaaagactgtgtactcatttttggttgccatgataaattcagagaggaaaaacatgatatatattaaattttactgcaacaactaactgccccttgtcatcagcctattctgtcactagagtgagtcagtattcctcttttctgactgtctgagcctggacgatttaaactgcttttcacacaacctcttgcccaaccttttctcacctcccattgtgaatgaacatagatttccctatggtaaacaaaacaaaatatcaccaaatctaaggcaagataaagaaattgaagataaaagaaaccaacccaagagatcagagaaatattcatctgcacaacagcttcctccaataaacaggggacaatctttaaaaatctctcatatgtgtttgtaacatagaatcgatggaactatatgaggcatttataagatttaatgatctgatatcagaaaagttgagatttgaatgaaacacatgggagtcggaaaaggagtgatgactggtagattggagcctgcccccaacccccggaaaaaaaaaaaaaaaacaccaaagggataatgaagacaagattgaattctccagaattcatcaaggaccagacttgaaatgacacatatatacacacaaacacactacacacaaacacacagggatataatatagaaattccagaaaaaataaaagaaagcagaatgaatagaagcattaattagcacataatggaagacaatttctcaggctataaagaaaaatactaagttgatccttgaaggcttactagacaaatcaagattaacaacaatgggccccggccctacatggaagaaaattatgccatccaaatataaaaaaatactgccactctccagaaataacaaaaaagaagaaattcatcttagcaccaagcttccgttctgtaacactaagtagtagaagttagtgtttgagaggaaatattgtacaataaaatttctgtactcggccaagctgccattcatctgcaaggcacagatgcatcgtcttaaataagaaggaaccccaaacatacaccagttagatatactgcctacaaaaagaaaaactcccacaaagctgtgggagtttttctttttgaagaagaaatcaaaattccaaatggtgttgtatcaaagaaatattaatgaggcacaaaactagttaaatggggtcactaaaactgttttatttaatatggaaataaaatatcaaagcaggactaattcttgaaagataattcatgtaatatgaaaagaagaagaaacttgatataaaaaatagattttatcacttcagctaggaagttagagatgaagtaagaaaaaccatcataaacttatcatatgtaggggacacatattcttgacataaaaaataaggagaaaatggtacttcacaccagtataaaatctatatatctatatctatatatatctatatctatatctatatatatatatataatcaaattttaaaagataatcagaagggcgaaaccacttggtccataaaacaaaagaggggtgagagaaacaagagctagcaagctttctgtctctcttttgggaaactagcattattacgttaaagtgaattaatacatgtattttaatgcctcagtttttctttctaatataataaatattaacagatataaactccattggtaaaatcactttgaggtccttaatacttcttaaagtggccgggcgctgtggctcatgcctgtaatcccagcactttgggaggctgaggcgggcagaacacctgaggtcgggagttcaagaccagcctggccaacatggagaaaccctgtctctactaaaaaatacaaaattagccaggtgtggtggcgcatgcctgtaatcccagctactcgggaggctgaggcaggagaatcacttgaacccgggaggcggaggttgcagtgagccgagatggtgccactgcaccccagcctgggcaacaagagcgaaactctgtctcaaaaaataataataataataataacaataacaataacaaaaatgtttaagagtgaaaagaattcttgagaccaaaaaagtttaagaactagggcttgatgatgttcaagcaaagataggaaaaggctattgcaagtacggtacaaagcacagggggaaggtttcataagtatatatataatatatatataatataacataaaattcatatatattataaaaataataaatatgatataaatttgatataaaatattatataaatctgatttttaacatattttgattttatactggtgtaaagtactattttctctttattttttacatcaagaatatgtatcccctacatagtataagtttatcatagtttttcttacttcattcctaacttcctagttgtagtgataaaatctattattttatatcaataaaaatattgatataaattttatttacatgatatacaatatttaaatataacatattttatattacaaaatatactactatgtattacaaaaaaaaaaacaaactccatttagcagagcaagaatggagtttgttttgtacagtgctgagttccaacccatagaattgttaaataaataaaaaggaaagaacactataagatcaaactcatcagttataatagtaaatgtgaatgattccaatccccccttttgaaagacaaaggcttctaaatatggtcagaatcctatttacagtagcatcaaaaagaataaaatacttaggaatcaatttaatcaaggaggcacaagacctgtgcactgaaaactcagtaactgaaaatgagcaaatgatgtgatagacatgtctccaagggaaatatacaaatgcccaataaacacatcaaaagatgttcaacatcattagtcattagggaagtgcaagtcaacctgactttgtactaggatgttttgtattaggatggttataatatttttaaaaaataggaaataaaaggtgttggcgaggatgtggagaaattagaacgcttatacattgctggtggaaatgtaaaatggtgtagcactgtggaaaacagtttgatgattcctgaaaaagttaaacatagaattaccatataaccagcaattctgctcctaggcatatacctaaagaaattgaaaacaaggactgaagcagatgctcaaataccaatgtccgtagcagctttgttcaaaatagccaaaaggtagaaacaacccaagtatctacgagcagatgaatggataaatgaaatggagcttatccattccatggaatattcttcagctatacaaaggaatagagttctgatacatgctacaagatgcataaactttaaaaacattatgctaagtgaaatgagccagacacaaaaggataaatactgtattccacttttatgaggtgccaaaaataagaaaatttattggactaaaaatagattagagataaccagtggaaggagagaatagggagttacaactcaatacatccagtttctcattgggatggtgaaaatttttggaactaagcagtgataatggttgtataatgttgtgaatgtcattgatgccactgaattatacccttaaaatggttttaatggcaaattttatgttgtatctcttttaaaacaataagaaagaaaaaaatttttaaatatatcatgtgatattaggaaagaaaaaaacagataacagtataagaaaaataagaatttaaaacatatcaaataagatttaaaaattttgtttaagatattgatacttggtccagtgcacaataaagacaagaactttttttttttttcttttgagatggagtctcgctctgtcaccaggctggagtgcagtggcactatctcggttcactgcaacctccgcctccagggttcaagccattatcctgcctcagcctgccgagtagctgggactacaggcatgcgccaccacgctgagctcatttctgtatttatagtagagacagggtttcaccatgttggccaggatggtcttgatctcttgacctcgtgatctgcctgcctcggcctcccaaagtgctgggattacaggtgggagccaccgcgcctggcctgaagacaagaacttttgaacaagagagcgctaactaacgtattgaaatacataaaacaaatactgatatatagaagagctcattcagctgtttcaaagacagagctctgtaacacatgtactcttacctaaagaactgtctcccaccactggaaaggaggtcttctctgaccaaatacacagcatcttggagttggccagcattaacttggatcatctggctggccaggaaaggagtgctcagggagaaagaggatggtcaccatcccaaccagattggccattagatctatgtatcaacagagtgacatacgggagaattaaaattctagtatgcaaaaatacgccgtatgttaacagaaaatagactgcagggaaatttgtattaggtaaaaccgagagaaagttaagagcatacaacagtagataagcaatagacaacccgatataaaaatgaggaaagaatatgcacaggcaattcacaaaaggaaacataaaaatggccttaaaaattgctaaaataaatatttaagcaaaaaagctcaacttcactatggtttggggaaatgcaaattaaagcaacaatatgtcatgttttcacagtcacattaataaaagtttaaaagacggaagtagaggtaaataggaatttgaggaaaaggagccctctcatagtggttcattggaatgtgaattgctgcagctttcaaaaaaaaatcttacactatccacaaacaatgaaagcatagatatcttcttagctactaatcccactcctaggaaaaggagtattaattacaataggttctttattgcagtattgtttatataagcaaaaagagcaaacaaccttgacatccttctattagcagtaggttgaataaatcataagacgtctactatgaactattttgcagcaatcaagaagacttaattagatctctgtttagtgatttgaatgggtgaccatgttgtgatgtcaacagaaaaaaataatttgcagaaaagcatatagagtttgttctcaatttggaaaaataatgacaaatttggaggagatatcctatacacatatgtgtgtttgattgggtttggaaaaatcaggaccacctgagatggaggtgggagtgacaaaatatacatggtatactaagtgaatatataggttatacaattacgttgttaaatttctgaaaacaagtgcaacttaagcatataactaaggagtagatgttaacctggacaaatgaaacatagattgttttgagcaagagacagcaaaattttttgtcaagagccagatagcaaaattttcaattttgcagaccatgcaatctctattgcaattactcagttctgccattgcagtggaaaaatagccctagacaaatgaatgtgtgattgtattttgataaaacttcatttacaaatacgtgctatagaacaaatttggcctgtgagccatagggtgacaatctccggttagatgaagggattgagagcattatttttcttcaattcttgtcattatgcaaagtcagagaattttctaaaataaataaaaatacaaattggcaaaataataatagttgaaaacttcagattgggcaaataagtgaacaaataatcacatgttgaggaataaggctgctttgattcttgtgtgttcaactttgaaacctttatcacagttataaaaaccatttataaaagtgatataactccacagagtatacctcaataaatttgcacatagaagaaatcaaaatgggtatattttctcatcgcaatacaccaaaaactaggaattaataagcaaatgatacattaaaaattcaaagttttagaaaacggagtaccttagatcttgatcaaagagaaatttaaaaacagccattgcagattacctggagaataacaatcgctaacgatcctcaagtgcatgtgcctcaagcattcttctaagtcctttacttgaattgatttacttagtctttaaaagaccctttgaaatggatatcatgcatatccctcattgtatagaagagaaaactgagacagacaggttaactaatttgtccaaattcatgtgacaggttgaggttagaattagaatatcgccagtcagcttcaacaacctgtaatggtaagccttacattatttatcttcttaattaggaatgctgaaacatatattactcataaaaatttctggggtgctgatgccaaaactgtcctcagagaaatttttcaatcctttttgttacttgacaggaaaaaattcaaataaatgaacaaaacatttcttaacaatttttaaattattaaaaacatatataaaaggctgctggagtaaggaattaataaagtaatgaacaaagaaaaaatcatagaaattataaagaaatctaaaagcagattctttaaagtgaccaattataaaacaaacagactgggtcaattgtcatttcacaaaataacaattctataaatatacaagaatgagaaagaagacataagcctgttgatattgaagagatttaatacttgataaaaatattatatcttctctattctaataaaattaaaactatccatgaaatgtaccatgtcagaagaaaaatacaatttaccaggtgtagtttaaaataggcagaattgctgataaacccatatctgtttgagtccatattttcaattcttttaggtatatacccagaagtggaattcctgggggatatggtaattctgtttaacttttcaaagaattgccagactattttccacagctgctgtaccattttacatccccatcagcaatgcacaaatgttccaatttctctacatcctcaccaacacttgtcatttttctggtttaaaaaaaattattattataccaccctaaaaggggctgaagtcagtttgatttacattttcctaatgactaatgatgtggagcatcttttcttgtgtttattggccatttgtatgtcttttttggaaaaatgtctattctcatcctttgtccatttcgtaattgggttgtttgtttcattgttattgagttacaggagtcctttatatgttctaagtattaaatccttatcagatagggttttcacatattttctatcattctgtgggttgtctttttaatctcttggtggtatcttttgttcttgacttggactgcaggacacttcagttcctcactacatgggcttctccaaaggacagctggcctctcccagaatgagcatctcaaaaagagaagaaaacattgcagtgctttttgtggttagcctctgaagttgcacactatatcatttccactttattctaatcattagaatcaagtcacaaagcacagcccacattcaaaaagagaggaattgggctccatcacttgaagggacatgtataaaataatttgtggacatatttaaaaccaccacaaagaagcacctttaaaaaaagacaatggcccagttttgtaactcttttttaacttcaagaaatagataatccaagtattaatattatttaaactgttatggaacatagaaataaaattatagccataattaaagtttgccaaagattacaaatgaaaataaaataaaatatatctctggctcatttgctaatataaatactaaaaatcttaaattgactattaaataaaaccaatattaaaagaattatgcaaggggaacaagtaaggttattccagaaatggttccaaattaggaaacccacaaacttacaatattaaagagtacaacttttcttaaatgtcatataaatatactctctaatgccaaaaaacacaatgaatggttaaaatctaaaagcatgcttgaatataattaaagttcaaaggaaaagaacactcggcatccttcctattattcaaagtagttgtggaaattcaaaccagtaaaatgacagccccctgtatttagagagatatacatatagatatagatagagagagagagaaggcaaatttattattaactgatggttgtttacctgaaaacccgaaggaattatttgaaaggttattagaataggaaatggtagtgagatatcgagtaaaaaataaatacttataaattaattactttctttatgtaggtaacaaccaaatagaatataaggaggaaaaataccattcacaacagaaacaaaatcatctagaaagaaatttaacaggaaatatataggacttataagcagaagatttaaaagagggggacatagaaaaatacttcaagaaatggaagatataatattttatttaaaagatttaatgttgtggtgatgttaattatccctgaattagtatgcaaatttaatgtaatcagtttcaatgacattcttttttttaatttgacaagatgtctgtaaatgtcatgagacccaccaacagaatattctgagataataacaagaagggtgtttgataccagatcagaggtgggtttgatacccacctctcagtgtctggtaaccacctttctactctctacttctacgagttcaactattttagatttcacatgtaagaaagatcatgcggtattagttcttctgtccctagcttattttggaaggtattttaaggcacaaatatgttgtagtgtaattatgttgtaatttttcctgacctgatgtcccacgtctgtaaaattcttttattgaagcctaggctctttccctaggactccctgtctggaatcataaatatcttacttctgtacttaacagaattgttctgtctgcatatagtccccactttttctccaagtagtttctcaaacaaatgcacttcctttcctgaaaagatgagtaagattttaacagctttaaatctttatatatagatatattttaagccaaacgactacactgtacatggttttatagccctctttaatacttacgaactatattgtataattattctaattattatatattactctacaacaccatttttagtggttgcattttggttattacttggatagtccataacctacctaacaaagtccttaatgtctggaattaaagtggtttcgcatttcaactgttagcaaaaacactacaatgcacgatcctgcacacgtgaaaagaaatgagatgaggacttcactaacttcaaagacagcttaaggattcagatcttcacatgtacacaagagacaagatttgcagatttgagtgaaaggctatgcacgattttaagcctttcagtacatattgccaaagtgccctccactaaactttgaccatgacctacggagtgagtcacaacagtgactctttctttgagtttatattactgctaggttttgtcaatttgccaatctaatgggcaaaaacggcattttatttgcattttaaagtgtatttatcatgtttataaggaagctaaacttttcatatgttcatttgactatttccatttttcgtttgtaaattatttgttcataattctttaccatttttctacttgggtgtttgcctttttataattgatgtataagagttgtttttattatttttcctctgtggtttgtcttcaaatttgtatgtagaaaggtttatttgtaattattcagttttatcagttttgttcatagtagaatttttcctcaatgtatgtctatagaagcctcaaatcagaaacacgtttgcctaaatcacctagttcttttatggttttatttttgacatttaatctttgatacacacggattttgctttgatgaatgtcatgaggcagagatctagcttagcttttcagatatttgccctatcaatgaataattcagttttccgtgtcttgaaatgccatctttatcactgccaatttcttacaaaaacttgtatctatttcttgggctttcccccattttgctctagggatctgtgtctctattcctgcatcatttcaattattttacattttaaatgcattttaacatcccttctgtttttgtgccttaaaataccttccaaaataagctaggcacagaaaaactaatgccacatgatcttacttccatgtgaaatctaaaacagttgaactcatagaagtagagagtagaaaggtggttaccaggcactgagaggtggggagctgagatttggtcaaagggcgcagggtttcagttagacaggaggagtaagtttcagagatctattccacagcatggtgactatagttaataataatgtgtatttcaaaattgctggccgggcacagtgtctcatgcctatagctctttgggaggctgaggcatacgaattgcttaagcctagaagttagaaactaggctgggcaaaatggcaaaaccctgtctctaccaataaatacaaaaattagccaggcatggcagcgcatacctgtagtcccagctactcgggaggctaaggtgggagaatggtttgaacctgggaggcagaggttgcagtaagccaagatcacatcactgcactccagcctgggtgatagatccagaccctgtcaaaaaaaaaaaaaagaaagaaagaaaagaaaaagaaagggaaaaaaaattgctagaagagtagattttaaatattctcaccacacacacacacacacacacacacacacacacaaaacaaatatgagaggtgacggacatgttaattagcttaatttaatcatttgcaacagaaacatatatcaaaacaccacattttaccctataaatatatacaattattgtttgttcataaaaataaaatcagattttaaaaaatattcactgtgtttttttcagccatacataggctggaaccttcttcacattttggctccaacaatctagcttagtcacagcgagcacatctaaaacaacctctaggaggccaaaagtcagaggactcccatgatcctgtgctcttagacaacttttaaatgtatgataggagacaggcagaggaaaacacaggtaataatgggattatccttttctttcctttctccagtggttctcaacttgtttaattgcagcaatttttaagattttttttcttggcacacttgaaaagattgtataccatagcctaaacaggctagcaataagtaaaattcaatcagtacctaaaacgtaaaagagactcactgtgtctacaaaaacattgacggtcattgccatagtcacacagttccctttagctttctgtcactgtttcgggaagagctggtatatcagttaggatttccagctgtaaaagacagaagaaataaaataacaggatctcaaacatagatagtagtttacttctgtctcaggttaaaaatcacgaaagtaggcagtccagggtttatacgatgactccataatccacagaaacctgggttccttccactttgctactctgacctcttcaaaatgagagcccatcttatctcatggtctaaactccagccagtatagaggacacagggaagaagggaaggccaattcctttaaagacactttccagaagttgcacaagacactccacttacatcctctggccagaagttagtaacatggctatgcccggctgtaaggaaaggtgagaagtgaaacctttattgcaggtggccaatggcccagttaaaaatagagggttccattactaatgaaggagaggaaagtggatactagggatggcaccagtagtctttgctacaaatggttactgccctgatcacatttcttacataatcaagaggaaaagttcttaactgttgcagttactgcctcatcattatatggcattccattttaccctttaatttttacttggtcaagtttaggcctgctgtacaccagaacacatgaatagctttgctcagcattctttgtgacgttgctcacagtaacattatggatacctaataaattttttaaaagacaaaatgttctacgttttgtggcctactctggatggctttaaggtaaagtgggtgagtatccctaccctttacatttcaagtgtaggggtgtttagctgtctcttctggctctcatttactgactcttctgggtaaatccattgttctttcttttatacaagagactatctgagcacccaaaacttgaaagtctctaagctaggtgctatagtgttaaatatttcagtaagatattttccctgcttaatccaggagcttgtcatttccttgctggaagtacacatggataaaataactgcaaggtttctgaaagacttaagtacaaaaatgtcctgcaaagaaaaagggaaatatctcattcagttgtgagggattaggaataaaaatgaattggagaggtcaaaatgtaagcttgtcctcaaaaagaaaggactaatttgcagatggagatggggtttcttccttccgaggtctgccatggtgtaatctgtcctgtaatgtctaatgtctacctgctattattttctaaatggtgagttaaatgggaaatatgtgtagcgtataaccattttctatcctttgctttaggtttcgactcattggttccccatctactacttgtctcgtctcaggcaataatgtcacatgggataagaaggcacctatttgtgagagtaagttgaaatacttttctccacaaattcctctgtgtgatcctgacttgcccctggagtacaaagaataaattgaatccttcttgcacaaagtagtctctcagatatttgaaaataggagtcagatgcttcatggtcttcctggcttttctttatcttaaaaggtgatttatctgaaactgtgggcttgaacctaggcaaaataccctactttcccattataatagtaaatatttccagtatagagagtgttgtccttaatgagtacattttaaaggcgttagacaaaattagatctgtctttgccaactcttactatctatcaggttacaattccacaaagtaggctactcactttcttgttattctaatccaaataataaaaagaactcttcttccagttcttagcaattttcctaagcctctgatcattttgagttctaatcctccttcaattcttttaggcccatgtcttcagttgtatttgttctcgattagctgaccctccatttttcccataagatatttttcaatgaatctccaaaactttaaaaccatggaagaatgattgcaaattggcaaagtgttatagctgtgaagaagtcgtcatcgcacacagagttgatggcagcaaaagtaggcacagacttccagaaagctaatgaccaatataaacaaaagtaaagtaaataccctctgactgacaattccatttcccagaatttagcccaagaaaataatcatgaaatagtcccatgattttggtccagagatactcaatgcaataatatttgtgatagtggaaaatgttaaacaacctaaatgttcagcatggtttgaaaatagctagtagaagaaataaggcatattttaatggctatcagtttttcggaaaggtaaaaaagtgcaccaggaggaattaaaggttgagatgcctcatccaagtggaaaaagtacatctatgtagctacatgactgattattattcagccaccaaatatggtagtatagaaaatatatccatccatacatatgcatgtatccacatatgtatctaagaggatataattaaattgttacaaatagttatctttgaaccattttcactttcttctttctctttgtccatattttataaatttcctacaatgaatgtgttcattgtagtcactaatattcttcccccccaaattaacattgacttttaaacattaaatgaatgagaatgtatacaaggtgcctcccatatctgccaagaacttgaaattctatgaaataattcaaattatcaaagaattatcagtttactatacaaagttttcaaggcatggcaccttttgtagggggttatcttttataaaaaaatttccacttctacatttataggtcagtgatcatttaattgagtcaatactggttatgtgtgtatatgtgtgtagtcacttagccaatatgtgaatattattatcttatgatagaacacagtattcatttatcattttattgcccttaaatctgccattatttcatttctcatgccttatcttttgtgtttccttttctctctttttcttcataaataatgccagaagtggtatatttaaactgcaaagaggttattttaataacctataggaaaaaatagtccagcaatagataagtaccttaacaatctgtgataaaatcacatgtattatccacttaaaattataaatatataaacccaaaaaaacatggattttttttgtgaaatatgagcagaacccatatcatacacacctaaatttcaactaggtaaaaatgtctgattattagcaaatattttaagaaaataacagtattgtaattccatttagaaaatcattggattatttgcatttggtatttaaattcatagtaaaataattcattattaaaaaataagctgttttaccatactcttccttctctcagtcatatcttgtgagccacctccaaccatatccaatggagacttctacagcaacaatagaacatcttttcacaatggaacggtggtaacttaccagtgccacactggaccagatggagaacagctgtttgagcttgtgggagaacggtcaatatattgcaccagcaaagatgatcaagttggtgtttggagcagccctccccctcggtgtatttctactaataaatgcacagctccagaagttgaaaatgcaattagagtaccaggaaacaggagtttctttaccctcactgagatcatcagatttagatgtcagcccgggtttgtcatggtagggtcccacactgtgcagtgccagaccaatggcagatgggggcccaagctgccacactgctccaggggtgagtgtgacccatcaagactttgctgggtgtgagggtacgtatagatgataggagttgttgaaattaaggaagaagtgtataaggactatgaaattggcataaacataatagtagcttcactgtctgttatctctgttaataattgtctcaaagtaatggcttattctctcatctatagtagacatattttagatgcatttttgaatttaacatttacagcaaatatatgaagtagctactattggtatccccattttactttgagagaactgagtcttagtgatattaaagaacttttccaaggctctgactccagagcctaatcataatgtacagtggaatgtatcatgaacaataatgtgtaatagtgatgatcgtatctctatccctggagtggggcagtaggcaagtgagccatgaggaccaaaatgagagcatcaaatcaaaaaggccttggacttcaacttcaactttttctcattataattgaaaagactgaagctcagaaaaagtgttttgctcaaatccaaacaaatatatatatatgtatatacacacacacacatatatacttgatatataattatatattgttcagattgaggctcaaattcattctttgaggttttttgattgtttgtttgtttgtatgtttgtttgagagaaggtctcgctctgttgcccaggctggagtacagttgtacaatcatagttcactgaagcctctaactcctgggctcaagtaagacctctgcctcagtctcacaggtagctggaactccaggtgctcactaccacacctggctaatttttatttatttttagagacagagtcttgctatgttgcccaggctgatcttgagctcccgtcctcaagcaatcctcctgcctcagcctcccaaagtactgggatttcaggcctgagccaccatgcctagtttcaaatgcattctgatgccctgagaacacaccaattgtcctgtggatggaggcagccaacatttcggttaaaatacggtctaagcaatatgttctatcactaaaaagtctgtagcttttttttctttgagggggggttgttctttttgtttatttttaatttattaatctttaatttttgtgggtacatagtaggtgtatatatttatgggtatatgaaatgttttgatacaggcatgcaatgtaaaataatcatggagaatgaggtatccatgcccttaagcatttatcctttgtgttacaaataatccaattacactctttcatttttaaatgtacaattaagttattactaactatagtcaccctgtcatgctatcaaatactacatcttattcattctttctttttttttttgtacccattaactgtccccacctcccctccctaccctcaccccctatccccacgattttgttcttgatgcctcctcttttcttagctgaaatgactggcttaaaacatggagtgggaagaattaggactggtcacagggacagaaaggaagctaacagttcagccctgtgctgactgaaagagggtcagggagtgtggaaaatgaagaatacgtgaaggtgtctgttagatgagaccttggcaacagtactccttgctgttgccttacgcatgagcttgagggactgcctctgtaggaagtggaagagtggccaaaccacccgcactcacgactctgtgctccataaccagtagttgaaagcaagaggaatatgctgccttatagtctttggaacatgtttcagtagaaaaaacacagacaaggtgttggagagactttgattctagtcacagttctgcttggtttccttagcttccttgttagtgagatgtggctactgaactaccaatcttctcttttaatagctgcactctgcaatgacgatttttaagccctctggtaagcataagatatagcaaaggaaattgccccatatctaacaagtgctctggaactgtcctttccacagtgtgtcagccgcctccagaaatcctgcatggtgagcataccctaagccatcaggacaacttttcacctgggcaggaagtgttctacagctgtgagcccagctatgacctcagaggggctgcgtctctgcactgcacgccccagggagactggagccctgaagcccctagatgtacaggtgccttgactctctggcttccagattgctctgttttccccttcacatggaggacttactcctgttgttttattttttcttctagtgaaatcctgtgatgacttcctgggccaactccctcatggccgtgtgctacttccacttaatctccagcttggggcaaaggtgtcctttgtttgcgatgaagggtgagtgtgacccagcgttgagaccaaggactcagtgtggagaatcactctcttgagatcaggggttaatccaattaaggagctgacctagtagataagaagtacccagagagattaatttatggaagggtagttttgaaataagggtagggactaagtggcaccactttcagaaggcaatgagaaaatggcacatacagctcaatgtcaggtacaaacctaaatacagtcactgatcttgagtacacagttggaacttgaaatgaatgggtacgtatttatttggaggcaaaagaacataattttataagaggtatgctagaaaataaatgatgaataagacaaaaattgtttgccccataagaagtaaggtagaggttgtcttaagaaacttaaaaccaatcaatagtggaatctgtaatagtgcatggataagtgtgttttaacccaataatatatcttcaggtcaggaatggccagtgtaattcttttaatgcaggatttttctcagccactttgccagccagtgacttctggacagcaatgcccctgcccaggccttgcttgggcccaggctcaccgcaggaaacaccccagatacttagcccactgggcggcgtctggctggtgctctgactgggaccctggggccaccatgactgcacactcagcccctggtgggaggggatgtgtgagtgagtgagtgtggggtccagctggccactccaagcacctgcacaggaatgggctctgagcagtgctggcggctggaccaggcatgtcacactgaagggaacgtggtggtgcccaaacaggggtgcccatgaccccaaagcccagaggaggtgttacagcacactaatggctcttagcatttgataatgcctgcagcccaacagatggcagtgtgcttaacagctctgtcaatcctgtcgccccacatctcctgtcgcccagctctggcttgatccgctgctgcttcctttcgcgtggtacagctgccctcccacagcagagggcggagggccacagtgttacaggcttctttgtacctgcgtttggtgggtcctgagttgttgtcccgcatccaagaagaacaaggttatactgacaatagaagggtgaggagggtggagaagagttttattgagtgacgaaacagcttctcagcggagacgagacacgagggtggaccccagatgaagtcagggggtcattctctctctcagcgtggctggttctggggcttttatggacacagaatggggagcctgtgctgattggtttgtgactatgcaaaaaagactaaaacaaagacaccactcaaaggtgggcacaacagtgtaaaaaaccaattagggaagctcaggtatatgtaaactaaatgaacagtgaggatcaatcagaggaaagcacaccaaatgggaagagaggttctcaaaccagtccatggatttacctggaacttgtagctaggctttaaactgtcttcagcttgaaggtcgggtttcaccgggatctgccccatctgcctaggatttgtctgcctcctgcttctatcagtttcaagtggtattattagttgtttatgtgtatccattactcttggtggtgtgcactatgagtctggagggataactagattgggcaattaagcagttatttttaatgatttccaaagaatcttcggcatttacaaagtccaccacctaataatgatttccaatttcagaatgatttcagatttcagaaggcaagcaggattcaataagttgggcattttggggtgcaaagactcttcccccctcccttctttttttcttagagcacgtggttcagcatgcttctgtgagcctcctctggcctgttacagttgtagtagcaagaagaacagtgcccgttctctttctagatgttcctggctttgcttaccaaatcgagagctgttctgcctcatgacccactaatgagaataagtgggatgtcagagagccatcagtgaaagatgacacctgaaggttatggctcttgtgcccatggagaagtatggttctgtgttcatgccttctgtaggtgatgctgggctatgaagtttatatggcaattatgcacatcagctctaattgctttgccagtcacagggtaccatggttctttagaataaattggcctttgagtttctgtcagctactgaagaattcagatccctaatgaactaagacttttagctgggcctgaacctaagacctaaatgatagtcgaggaggaaatggtagtgaggaagctgagcatctattagcgaagaaatcaagggagagatgggaattgctcacacatttgctaccactttttttttctttaggttccgattaaaaggcaggtctgctagtcattgtgtcttggctggaatgaaagccctttggaatagcagtgttccagtgtgtgaacgtgagtagaaagaactatgtagtttggatagctctccttattttcgttttccagcatgtttttccgcatggcatcacctgttgtctagatctttacttaactaaattatggataaaaatacttctttgttggaagaatttcaagaagggtcttgtaggtcttctctgacatgtgtttttgttactaatctgcaaatcacttagtttaatgactgtttaattttgtggggaatgtgtggcaagaaactagatgacataaaggtgcagcacgttttagtcagtcatttatttttagttttcttatcaaggaggaatctttcttaaatttttatttttatttttattttctgagacactgtcacccaggacagagtggagtggtgcaatcacagctcactgcagcctcaacctcctgggctcaaatgaccctcgcacctcagcctcccagtagttgggactacaggtgcatgccaccacacctggctaatttttgtactttttgtagagatagaatctcgccatattgccccagctggtctcaaactcctgggctcaagctatcctcccaccttggcctccaaaagtgttaggattacaagtgcgagccaccatgcccagccaaatttttatgttcttttatcccctcgcatatcataaacaatttagtcagcttgttttttagcctgcagtatttaatgacatagggcttcccatgtgccaggactttccatgtgtagaaaaagcaatgaatagtgaatgaatagtgaagacacctccctactttcctgggatgtattttcttgttgggaagcagactatgaacaaggaaataaataagtaaacaaaattctaaaaattataacatataaaatggtagttaaatagggatgttatggagaaaataaaacagagttatatgataaattagtacgatggaaggagctgggatgatgaatcagtgtctgaaatgatgaggtgtcctaagtttccaaaccatccgcttaaataaaatatgccaaaattcagaaaaaattcagaaactcttagataaaagtacatgtttgacataccaagacattactgattgattctattctgtctactaaagcaaggcaagaattttttaaaccttgttttcctgattattagaaaatgtttattttaatttgtattgtgttaaaataacttatagaaatcaatttggataccttatggtgagtattatggtgaagaacattcaatacctgaggaaactcaagtattcaacaaactcaaccttacagagacacatagagctgaaaataaatatataaataaacttaggaaaacacaaacaggtaaaattcaagcatgagaagtcaatcattgtttgatgtactaggtcttttatatacacataattctgataaatttgggtatctcttcctaaattcatatcaaactagaagcatcaattgcttttagggaaggaactgttctaagcagactaaaaggaggaagaaatggtggctaataattggaagaaatcaaaaaaggctctttggcaccatttaatctgagtaaaaacagccttactggtgtctgatgacaccactggaaatttggtattggtcctgatggtaatggtcttgaatcaccaagaaacatttacattgctaaagatgatagctcatgtttattaaagttcatagatttccttgaaacttatggtctctgatgaccaaaactttgtctgtcttgaacctcattgtcaactcaggaatcttactatgcctgagttaaagtagacaaccaaatgggtgtttttaaaaaaaataaaaacaattactttccaaattcattgtgaacataggtacctgagtggtccaggaacactgtctttgggcttttgcaataaactgtaatttaggtctcacttcagttagttgcctctcaacaaaagccttacagatttaaattccgtctaccttagttatattctttctaaaagttatattctttttaagcgcacagtcacaggtcactattgtttcagtcatcttaagtgaaattctaatagaacttaaagctcttgttttctttctagaaatcttttgtccaaatcctccagctatccttaatgggagacacacaggaactccctttggagatattccctatggaaaagaaatatcttacgcatgcgacacccacccagacagagggatgaccttcaacctcattggggagagctccatccgctgcacaagtgaccctcaagggaatggggtttggagcagccctgcccctcgctgtgaactttctgttcctgctggttagtacctgcttccacatatcctaaatgggttcagaatatctaggtaagaacctccatatttctatagtgacagtcatttttgcttgtgaaaatggctttgctgtaactgtcagagacagaactacctcccaagtgaatgacaaacgggttatagataggcacgctgtctcaattgttggtattctgatggtccttcctatggggtgaagagtgtgggatggtaaggagagaagggggtggacagtgaagagaattgatgaggtccagatttagtagggaatgttttcaaagtactgaaaacaaatgctaaagaaaatactcttttattccacctctactactacgagttatctttatcctggagagatggatgtgctgtgcaaaaagtacacattgatgatgtaatttacttcagaactgataacgctataaaagtaatttgagaaactcagatgtagggatttatactttttatgttgtttccaagggtttgttcaagccactgactatgtttgtttgatccttcacctcaacattaacaaagggaactcaggaggccctggagaagcagagtttaaaattgtactcttagcctaatgggtgcagcaaaccaatatggcacatgtatacctatgtatcaaacctgcacattgtgcatatgtaccctagaacttaaagtatatatatatatatatatatatatgtgtgtgtgtgtgtgtgtgtgtgtgtgtgtgtatgtgtgtatatatatatgtgtatatatatgtgtgtgtgtgtatatatatatatatatatatagagagagagagagagagagagagagagagagagagagagagattgtactcttagcctccatagctcattcctttgatatattagtctggctttaaacgacagtacctgacaactgtaggcacatgtgtggctgtgactgcccacaccagttccatcttccagtaaggacagaacagcactgaatcggtagcttgtcgatccctgtggtactcccccatctgatctagtttgaagttagagactgtagaggatagtgtttaaatgtcaagaggtctaggtttagagaacccgtctttcactgatcaaataggagggagtggcttatgacctggctggttgaggtcttcatgtacctctaatagccagagatattggatgtgttcatgtattcatatgtctatgtttaactgagtgtcttttcttgtgtttgtgtgggaacttgttcttagcctgcccacatccacccaagatccaaaacgggcattacattggaggacacgtatctctatatcttcctgggatgacaatcagctacatttgtgaccccggctacctgttagtgggaaagggcttcattttctgtacagaccagggaatctggagccaattggatcattattgcaaaggtgacttatttcttggtattccttattcttgctgggttgtatggaatgcatgaggcttgtaaggctgagagacattgaaatgagcttaatgaaagggataatatttttttcttctcggcaactgctttcttttcatttacataaaattatttcatcttattaactgtcctctttgcatggtcgatagcagtgcttctccatccagagcattaacaaaatcaccttgttaaaaagattctcaaactccattccatggcctctgattctgttttaaagtggggtcaaaagtctatttttaacaaactcatcagaatgctctgatgcaggaagaccacagaccacacttcaagaaataccactttgccttcttggtttgtatctaggaaaaaaatattgtaggcttaattttgagactattacaactgaaaagaagtctgtgcttgaagatgaaggatgtactgatggctgggcagaaaaagaaagtaaaacaaaggataagttaaacaaaataaagtagtctgggtgcggtggctcacacctgtaatcccagcactttgggaggctgaggcgggaagatcatgtcaagagatcgagaccatcctggccaacatggtgaaaccccgtttctactaaaaatacaaaaattagctgggtggtggtgcgcgcctatagtcccagctactcgtgaggctgaggcatgagaatcacttgaacccagaggcagaggttgcagtgagctgagatcacgccactgcactccagcctggcaacagagcaagactccgtctcaaaaaaaaaaaaaaaagaaaaagaaaagaaaagaaagtaaattaattagaaagatgtattaaattcaggctgggcacggtggctcaggcctgtaatcccagcactttgggaggccaaggtgggcagatcacctcaggtcaggagttcgagaccagcctggccaacatggtgaaaccccgtctctaccaaaaatacaaaaattaatcaggcatggtggtacatgcctgtcgtcccacctacccgggaggctgaagcaggagaattgcttgaacccaggaggtagaggttgctgtgagcccagatcgcgccactgcactcctgcctgggtgacacagtgagactcaaaaaaaaaaaaaaaaagaaaaagaaaaagaaagaaagataaattttaaattcacaatcatgatttactaacttctttgttctatgtgcagaaattggccagaattatgcatttaataaagagcagagtgccagtatttgttgtgaagccagacagaattaacatggtactcctgttccctcacagcgtgaccccagtggctccagggctagatcaccgttagcctaattcctaatctttccacagctttccagttgcagagctgttaatcaacagtgaatgcacagtacattccatattctattactttacattaagaaatgggagtcaggaaatgttaaatcataaggtttttggaggaggaagattagtaacatgtttaaaaacatgcttcctcttagccaagggcaaaataggttttggctattttctcctattctcgcagttaaaacggacaatcaacaataaaatatcaatttctttctgatttgtctaatttcagaagtaaattgtagcttcccactgtttatgaatggaatctcgaaggagttagaaatgaaaaaagtatatcactatggagattatgtgactttgaagtgtgaagatgggtatactctggaaggcagtccctggagccagtgccaggcggatgacagatgggaccctcctctggccaaatgtacctctcgtaagtgcaagtgcaaggaatgtgggatcttcccggtcatggttattgctcattcattcatccatattggcatcaagtgtagtgtgatgtttatggcatatgctatgagctatagagtacaatatgagcatccacctattccaaaactcccatagtgagagtaaggccagacttcctcttctcatacttctcactgcagctctgcaccttttttgtctatatcactttgtggttgcatgagccacacagtaatgatttatttacagcctacgagccttacaagaaatgttttcagcatgagttagggagcaccttccaagctgcagagagcagccggcctgtctccctcactactggaggggacaggattttaagctagcacagctggatagagcagatttagaaattacgtatcattgagctctgtagaagagtagccctctgctggcaactggaaggtactgtaagatagaaaactacccacatcatggagcagatgagcaaagttaataatgaacagcctttcttaatccaagttagtgctacactttcccttctccccatctcttatgactcttctaatacatggttctacaccaagattgttcaagatccagttttacaattaatcctgtaaatatgctaatatgactcgcagataatatttctaaattatcagcttgacactcccttaatatcaaattatatttgcttttttggcaaaaatctcactggataacttactaaatgcttttagagtattctgaagatctggctgggactgacagaaaattcaggtcattggagaaccaaccgtatcaaatattagaacaaaatataaagcaataatacaaaagtcactttgcaccaggataagaagagacatacaaataagtggaacaaaattgatattaataaaataaaggggccaggtatggtggctcatgcctgtaatcccagcactttgggaggccgaggcggatggatcacctgaggtcaggagtttaagaccagcctggccaacatggtgaaaccccatctgtactaaaaaataaaaaaattagctggtcgtggtggcagatgcctgtaatcccagctactcaggaggctgaggcaggagagtcgcttgaacacgggaggtggaggttacagtgagccgagatcgctccattgcactctggtctcggtgacaagagcaaaacattttttaaaaattgtccattaaattaacaataaaaaggttgttaggtgaacacccaatacaaagcaaggatgtgatgaaactgatattgttgtgtgttgaaggtactattgtaaatttgcaaaaactcttatgaaaaacaattatgaaatgtatgtggaaaataatacaactattcctgccagttagccctcctagaaatttaatctaaggaaataatgtaaaatattaaaatattctatgcattttattaagggtttcatgagacagaaacctagaaacaagctaaatgcacaatagaagtcattgaatacactatgatgcatctactagattatgttagtttgcctttgttgtaacttatatttctagtatataattatgtgaaaacacacatataaggaaatgtaccagaacagaatgtatcaaaacattttttgggtatgaggattggggtgacttttttctttagttctgtattataaattttcttctgtaattgtattaataataatttttaaaagtcttctctgagtgcagaaggtaaaatgagagtatgtgaatgaaaccaatggctttttgcattagaaaaaatattagactgagtcctgaagaaaaatcaggatgacttgtcactggctgagaggtcctgttcaatcatgttgcatgccagagtgatgttttgtgacttttgtcttccttttaggtgcacatgatgctctcatagttggtaagttttatgaaagttttgctgaggaattctggcatctataacagtaagtacctacctataatgaatgaaatgtaaaaagagagatcaaaatgtcttgaggtgtaaagagatcaaaatatcttcagttgtaagttcaactagaaagaaaataatgataagttaggccacaatatggtgaaactggcatcgtcatatgcatactaaataaccttcatcaaaggctctttactatctttgaaccattacaaatgaataatcattcatcagtgtcaaaaattctttatttgaatgtggtgggagaatgcaacttcttctttcagttgtaacctggagtatgcttccagatggtgatcctgctcatttgcacaaatagaaagccataagaccagtcttctgagcccatatctgtgatttgcctaaataagaatagttttgtaataaagtttgcttccaagggaatactgtggcatattactcttacatccctttttacgcatctggacactgagacacagagagttaacgtaacttgtccaagaccacagaatggggtagcctgggtctacttatctgtggagactgtgcactttaacaatcaataaatggacaaaatgacctaaatatgtaattcaacaagagagagaattccagtattttcacaatgaaatgcctgtgtgttaagtcttaggcaagagacatgggcagggccatggagagctggtggccagctgccccatcacggttctcacttacttttggaaaagctgacattggactaaacgttacaaaacggctcagctcacaccttaactttaataaccctgtgggagtgagactaatgctatagaaacccagagtaaagcagaatgtatagttacatctttaaaaaaaaaaaagcattggcaatctgtagtgggactggatactaagatagaatttaaaacctgtaagttatattttccatgcatttaattaccttgttttactgcctaggcactttatctggtacgatcttctttattttactcatcattttcctctcttggataattctaaagcacagaaaagggtaagtatagccatattatcccaagaaatgtaaactgtacttaccccctcttggaagtcaaaagaaagtaaaagacaaacaaacccattgctacataaacagatgtggtaattcttataaagaaagtccttgacacacagtatagacaaagaggtattcacactaaaggaagtatataggatactaagaacaattaaaaaataataataataacaaaaaaaagaccatttggccaggtatggtgactcatgcctgtaatttcagcactttgggaggccaaggtgggcagatcactagaggccaggggttcgagaccaacttgggcaacatggtaaaaccctgtctctactaaacatacacaaaattagctgggcgaggtgggacacacaactgtaataccagctactcgggaggttgaagcatgagaattgcttgaacccaggaggcagaggttgtagtgagccaagactgtgccattgcactccagcctgggtgacagagtgagactacatctcaaaacacacacacaaacacacacacacacacacacacacacacacacacagcattttaagaaggaattgagttttacagaaagagaaagtaggcagaaggggtttttaaatagttgttcatgaggctgtttgatatcctagttttgctaagacattgcagacactgacctctaagcccagatcctatcatagcactagaagttagattgggtcacttatggcacacatatcatatggcacacataggctgccagtggggaagaattgaaactttccattgggtattttaatatataaacaaatattttgtaaacaccattaactttttttttttttttttttttttttttaagaccgagtcttgctctgtcacccaggctggagtgcagtggcacgatcttggctcactgcaacctctgcctcccagattcaagcgattctcatgcctcagcctcctgagtagctgggactacagccatacgccactacaccaggctattttttgtatttttagtacagaaagggttttgccatcttggccaggctggtcttgaattcctgacctcaagtgatccacccgcctcagcctcccaaagtgctgggattacaggtgtgagccactgggcccagccatcattaattttttaaatttgaaagaaaaaaaacttgcaaagactaagatctgaataaagaaacgtctttgacagggaagagaacctacacagcttttgtactggttgattgaattataacaacctcaatgaggccagaatcaataatatcaatgttatatggttgatgagcaagttctatacccatagaaaaactgaatttgtaacttttaagtgaacggttttctatagcaaatattctaaacaagtacagtttcctacaacaagctttacagaaactgaagttttgatatttcacaaagatgccaatatactttttaaaaagtagtttgtcatagtagatcttgctgtaaagaacctagacaggaactcaatttcatggaaaaatactgaattggtagatatttaaatttaaatatccatccttcctaactaatgttctctatattttacggcttgacatatattctttgctcttttccattataaaaagaaaaggtaagtagctgggcactttaccttaacaaagtacttgtgtcaatacatttttcctcttaaagtttctcattaagtaccatataattagtgagttaattttttaaaaaattactactacgtctgaattaaaggagttggggcttctaattttctgtatctatatcagtctgtagttaaaaccacacaggggaaatgattatcccttcttcttggaagtattcaagatactttaatatcttgaagatatttgattatctccacccttctaactatgtcattcttcattacttatggtccattccttgttaatcaactagagggtcacactcccaagcctaactattgatttgtttcacctacataatttaagatcatttcctcatattaatcaccttcaggcataaacatgactcaataaccatttcataaaattatttctttggaaatgattgtcttgtaaagtctaagcaacctgagaccatataccatttcttcatgttttccatctcgtaaaacctgcctcctatttttttcatattctttaaagtgtaatgtccatggcacaaccattctctctctgaccagtggctaccagaaatgtggcagaaagaaagatcatgatccttgttagacttaaaggtcagggaggtaaacctcccaaacatctatgtaacccacactaaaacctattctatatgtgtaatccaggaaagtttttaaacattttctaaacttttacttttgacctgtttcacttcttgggattgtaactgcctgatgtgttcttcctgcctgtcatacagacaaaaccagttccctgagataatggcatattgcagtaaagaaagagatgaattaatacaaggccagtcacgtggaagaactggagttatcactcaactcagtctccccaagaacacaggggctagggtttttatagatcatttggtaggaagggagctagggaatgggtactactgattggttggggatgggggtgtgggaaatgttcctcatgtgctgtgtccacctctggttgggggccacaggaccagttgagtcatgagtcacaagtccaggtagagtcagtcagttgccaaatgcaaaaacctgaaaaacatctcagaagaccaatcttatattctacatagtgatgttatctataggagcaattagggaagtcacaaatctctgagcagtaatggattataaaacctatgcctatattttagcagagttcaggtccctctcctaatcctaatctcttggcctttcattaggtttcaggtcctgagcaaggagagagctagttttaggaagagactgttattatccttgctccaaagttacattataaactaaattcctttcatggttagcttggcctacacccaggaatgagcaaagccggcccacctgtgaggctagaagcaagatgaagtcagccatgttagatttctttcactctcagaatctttgcaaaggtggtttcagcatagtgagtgcatttatctaacaaaacaccactgattttcatgttagaaataacacatagctaaaactgggaaaaagaagtaataaacttaaataatcagaaggcagaggtcccttctttcggaaggagttgggctgattaatcatgcagtcatacctccttgagtgggtgtggccaataagctaagtcattgtggctatgtgaggagggctgattattccttatctggagctcaagctttcctcacagaaagacaagggcataaagggcctcatggcaaagaagaaggaagccatgtgggaaacacagactatgagtggagagtatcgtagtggtcaccaagtcagaagagccatttatcctggagctaaaaaagactgacagatatagaatagtgtagaacaagatggcctgctctatgggagagccacagtcacaccaggcctagagaggtgcaggctgacttctacctcaaacactggagacaattcagaagctgcataagcagtctgaagacttactaagaaactaaaatgaggctgggtgcgatggctcaggcctgtaatccctgcactttgggaggctgaggcgggtgggtcacctgaggtcaggagttggagatcagcctggccaagatggcaaaaccctgtctctactaaaaatacaaaaattagcctggtgtagtggcacatgcctgtagtcccagctactcaggaggctgaggcaggagaattgcttgaacccaggaggtggaggttgcagtgagttgagattgtgccactgcactccagcctgggcaacaaaggcaaaactccatctgaaaaaaataaataaataaattaaataaaataaaacaagaaaagaaactaaagtgatagagaaatagaaggaatacacacacagaaatgatctcaccttctttaaaatgctcctcaaggaggtctactttaactatcctagtaaagatgacatgaccccacccccacattcccagtctctcttatcctgctttatttttttcatagccttattctcttttattataattaattaaataattacattccatgtttattctctctctccctccatgaagtcggggatttttgtcctatcttcaccaatggatacacaacaaatctaaactgtccctgggacaaagagagtctcaataaatatttatcaaatgaatgagtgagctacacaccactaacagtgttaccacaaggggaaatttctgccgtaattctctaccaagttgaacagtgcgtctttaacttgtcctaaacttactccaggtttcaaggctgctccttgttctaatataccaactgtctcagtctgttggtatatatacttgggcagttataacagaaactccatagactgggtggattcaataagcatttaagctgggtgcagtggtacctgcctatagtcccagctatctgggaggctgaggcaggagtactgcttgagccaatgagtttaaggccagcctgggcaatatggtaagaccatgtccctaaaaaacattatgtcatttctaaaaaccaagcatttttttctcatagttctagtgggtagagagtccaaggtcaaggcaactgcaaattcagtgtctggtggggatcgctttctagttaatagacttcaatcttttctccgtgttctcaaatcagagaaaaggagtaaaggagctctcctggtctcttttctaagggcactagtcccattcacaagggctctgctctcatgatctaattacttctcaaaggtctcacctttgagatcctatagtaattagatcctataaattttcaacatataaatttggaaagatacaaacattcagtccattgtaccaacactgcatttggtaagcacatatgcttaaacgatatcacacttgatttcatgtgccttctcaatcctcagctttccctgattaagaatacctaattactctgcccatttcctctgcaccctccaccttggcctttccactcactattactactatctcctgccttcttggtctctactattctcctcaccatccctgctccctggactatgatcccctgtgagcagggaccacctatatccacccaaagcaatttttatttaatgattttttaatctctacttgtacagcagtcaaaattaataataagagtagaaatggttaatgtatctacaaaaagagttaacatgtttatttataggtttatttaccatttattatcttctttggtcctcaaagcaactctgtgaggtaggtaggcccaatcatattgttatcccaaagcataaaacactctaggttcaaagaaattcagtggcttgtttaaagccagtaggaagttgttaggaattaggcctttagtccagattatttaactggaaatcttgaactctttgtgctagtattttgacaatgttagttgccatttctgaatctgactctatattactgaaattcagtatccagaactgtacatagtacaaacctaaagtattttccttttttctttcaatattctttttctccctatattttactgagtttgttttagctactttggtatattgaaccagtatctttctagagaaccgtatgcaatctctactttttttactctttattctgagtcattaggctataaaaaattaaggtatttctttaagggcatctttccatattgagatttcctggcgtttcacacagacttggcaagttcttcctgtgatttaatctcactgccttgttatttcactagttaaaaatatgcgcctgcacgttttgatatttcactgtgtatttacaacaataatttgtgataatgttaaataagataggtcataagataggtcatgcactcatcagtgaggaataatactggttagacttcttcattcagagcccattattgcctcttgttactgcctcgtacccactcccatttctacacaaaacagccttgtccacagtcaaaatttcaaagtttccattgttgtgatgtttagaatgataaaatacttaaggccatcctctgtgaagtctccctgaattttcctatgttcacattaaccaccagtaactaaccaaatagctcttcattcaacatatactcaccgagatcatattctccaaaaccccatgtaccactcatcacccaagaccaccttcagaacactactcatcttaccacttaaccaccactccttggaaggtcataccacctggctatataccactccactcttcctcatccatggatctcaagtgtgccttccctgtcctgtgaaaactctgccccctgaagcagtctgcctctttttctcaaatgatgctgtcattctaatttccataagatggtaaagaataactgagtgatgaggaaacagtggtacatgttgaagtgagttaactcttcaagcttccattctaaaatccctaataccaactcatacataaaatctccaggtactggtactgttttatcatttcattgataaaagatgaagtgtttattaacccccaaagaggcagtgtaccataccaagtgagggtgagggctttgcaaccgctaaggcctgtgttcacagtcactcactctctatgagaccctgagcaagatacttatcctcagtaaatttcattttccttgcctgtgaaatggagataataatagttcctaccttacttaacatagtgcctcatttatgatgcatgtcagaaaatgttagctattatttacacatgattgttattactgatattaaaaagtgagtaaatatttctttttactgttagttcttaaataccttcatgacagctactgctgctcccctaaccgtggatattgcttgtacagaaaacagaacacatatcttcactataggagaaaaaggaagcctcgtgtaacactgcagtgcaaagtcattcatgttgtgcagcttaagtgtcaaaatctcgatgtaaatcctatttactaatcaaaattatgtcagaaatagtgaaatgtgttaaggcatggacatctgcctataaacaatttagagtactctgacagaaaatataggatgattttagtattattttctaatctaagtttttgcttagtattaaaagatgagatttggttatgattttcctttcagacgtcttgcaaagatatcaggaacttaaggcaaataataccttaaatttcaaaatgcaaattactaatttctttcaaaacagatacttaaatgattaagacagtttttctatttttttctctgccaattagcaataatgcacatgaaaaccctaaagaagtggctatccatttacattctcaaggaggcagcagcgttcatccccgaactctgcaaacaaatgaagaaaatagcaggtacctatatacatactgaattcaaaatgttttcaacaactcaaatatcaaaaatggaaacaggacttgaatatgatattgcactaggtaggtcattgataccaaagaatttagaaagtacttcaggagttggaaacttcttttttttttattggattattattgtcatttccactgttttggggtgatgactctataagttagtacagtcacagtcactactttttcaaagcattcctataatttcctgtatttatgctatgaaactttgagaagtagtatgcttttttcttgtggaacccaagaatttgctgcctgcttgtacctccaagtcttccagcttcccttaaatgcacagagtcactttaatgtcctctagagactttcactttacctccccagccaccaacccccttgatttctgacttccactgaattctctacttcatttggcctctttgactgctccttcttttggtcctcattcccttgggcttattaaatacctaacctttcattctacctattcaaagcaggcttactgcaagctgttgtgcagtacacattgctaaagatttggggtgaaaagggaaattataccattatcaaaagtggtatgtatcaatattagaaatcactgaactgaaaagtaactagtacaccagggacctgaaaactaccacctgtgagccaaatccagctggccacttgtttttgtgaataaagttttactggggcacagccacacccaatcgtttgtctactgtctctggctcccttttatactacaacagcagagctgagtagttgcaacagagaccccaaaagccaaaagtatttactatctggccctttagtggaagactttgctaacccctgaactatatcatactatgagaaatttctcactggctagttccccttttaacctgggctttccatcctcttcccaggcctctctctctcattggatactcctctcttttgttcaaatctttactgcattctcagggtatgcagtaaatacaggcattcagactctcgggcttcttgcaaattcaaaactccatttttctttaaaattcagagcaatttatttggctctggcttactttggctatgcccaagaatcctaaaatgtcctacccataggtgtttggaacattttcaggaataagatcaccatatgccctagaacagaattaggccagtcctgtagaaagcagaagcaaaagcaccacaatcattactgaatttcctttctttatgtcctacctctttctcatatacctgtgcattaatctaaatttggcatgttacacctacatacatcagaaatcctaaattcaacagaggacagtggaaggggccccaggaaaagtaaaggaagtggaaaaggtattttatagttaaccaaaacataagtagaagcaattcaaacttttctaaacaaaaaattacagattatgtcctattttctcctataatagaaatgaatttgcaatgccctgtttattatctgtcttcctagttgctttgcttctagcttatttgtcattactgtttatgaaaacaaatgaaatatgcattgcttttttaaaattcagaattgatattttactttttgaagctttaatgtttatctggcctgatccttctcaaatgggcatatgtatacactgggggatacatggctaatgctaatataccaaggggatataaaaatcataagatgaaaatggcatggtttcctagagaatatatttttctaatattactccaatagttcaaataaaaattgtattatttcaacatgaacacaaacacatttataagggaggaaaagacaaataaataatgcaggaagtttaagataaaataagacggctgggcgctgtggctcacgcctgtaatcccagcactttgggcggccgaggcgagtggatcatgagtcaggagatcgaggccattctggctaacacggtgaaatcccttctctactaaatacacacacacacacacaaaatttagccaggcgtggtggtgggcgcctgtagtcccagctactcgggaggctgaggcaggagaatggcgtgagcccgggaggcggagcttgcagtgagccgagatcgcgccactgtactccagcctgggtgacagagcaagactccgtctcaaaaaaaaaaaaaaaaaaaaaaaaaaaagataaaataagacagaaaatattgtgctttcagggatgctttagactatgtctccaaagttcttgcgtgaggcattcattttcctttactatcagagtgctatgggggaaaagtcaggcagaactgattcagggccagctgtgtggccactcatttacaaacagacgaaataacagcagactggaagaacaacaaccatttttacaagagttcattttaaaaatattccacaatgataaattatttgatttagcctcattcctgtcagattacctgcctaaaacacttttccgcctttctttctatctaaattccctgaacccagctccagctctgaattcaatcaaccaagatgctctcccaaacaactctagtccaaaatgatatctctctttgaaactcacatttcctgactacaccatttaaaaaataaactaatttattttaacagtaatatctcatcattgttaaaaacaagaaataggggaaaatataaaaaatataaaaattacctgcaataatctctatctagtagtattcttaagcttctttgcatattattagacatttgcatatacaccttgagattatattgattgcacaatattgaatcctgctttttttaccaaatgacaaacatttctcccatcattataacagtacataacctatagtaattgacatttcctgtgttgttttttgcctgttaactctattgcattcatgtagttgcttatttattcttcaaacattcttagccacttacaatgtgccatacattgtgcttatgtgtgttttcttttccatgctaaattaacctctgatgaatagagacaattttttaaagatctccccaatctctgagtataatcaaatgagaaatgttcagtaatcaactgagcacgttaatcaattgagaaatttttcatgcacgtccctgtgaagagatcaccaaacaggctttgtgtgagcaacatggctgtttatttcacctgggtgcaggcgggctgagtctgaaaagagtcagcgaagggagataggggtggggccgttttataagatttgggcaggtaaaggaaaattacagtcaacggggctttgttctctggcgggcagaagtgggggtcgcaaggtgctcagtgggggagctttttgagccaggatgagccaggaaaaggactttcacaaggtaatgtcatcacttaaggcaaggaccggccatttacatttcttttgtggtggaatgtcatcagtaaaggcggggcagggcattttcacttcttttgtgattcttcagttacttcaggccatctgggtgtatacgtgcaagtcacaggggatgcgatggcttggcttgggttcagaggcctgacaaaattaatttatgaaaatttcatttatcctcaactttttggaaatactcttacatcaaagtacacctcaaattgtgtacactgactactgatcacttttcggtaggtataaagtccttaaaaattttgtttcaactttcccttttaagattagaattttgaccacagtgttccatgggaacaaagtgaatcatctgtggcaaaatatgctagtcaagaagtgagttagaatctgtgccaagcgttaagaccttgtgcacccaggttctggggcggagtaaagaggcaggctccaaagacatagctgtgtgttggacatgagagtatttggaggaatacaggtaacaggtgatgctgggaagtcctgtgaaatggaaggagaacgaagatgaggaatctggtggcagtaataaccggggaacagatgagctggaggcctcatcaggaggggtgtcccttggtggaaggacaccattcccggccttaaaaggagacgcttcagcacggctggggaagcacgtggataccttgtactaaatccactactgcagctcattcttaactgtaagtagaagaggaggacatgctttctgaagctgacccctccaagatgaccagttcctatttctgtcccctgctaccaccatggtgtagaacaacagaatcaaaaaaacattttttctgttatgggtgacctgtacgttttctagaatggaaggaggctgtttagtagctcaactctgagaacactttttctttggacaaaattaaaaaaggaaaaggtcaagttaatcattaatctctctgttttctactaatgtctccattttcgccatactttctatgtcctacatagcagccatcacagagggcaataaacacttctaatgaccgtgtaatttatatggaatgctgaaggggtgggttggccctccacacctgtggatgtttctcattaggtggaactagagacttggaaaagaaagagacacagagacaaagtatagagaaagaaaaaagggggcccaggggaccggtgttcagcatacggaggatccaccggcctctgagttcccttagtatttattgatcattaatgggtgtttctcggagagggggatgtggcagggtcataggataatagtggagagaagttcagcaggtaaacacgtgaacaaaggtctcggcatcataaacaaggtaaagaattaactgctgtgctttagatatgtatacacataaatatctcaatgccttaaagagcagtattgctgcctgcatgtcccacctccagccctaaggcggttttcccctaactcagtagatggaatatacaatcgggttttacaccgagacattccattgcccagggatgagcaggagacagatgccttcctcttgtctcaacagcaacgaggcgttccttcctcttttactaatcttcctcagcgcagaccctttacgggtgtcaggctgggggaaggtcaggtctttcccttcccatgaggccatatctcaggctatcacatggggaaaaaccttggacaatacctggatttcctagacagaggtccctgctgccttctgcagtgttttgtgtccctgggtacttgagattagggagtggtgatgactcttaacaagcatgctgccttcaagcatttgtttaacaaagcacatctgcacagcccttaatccatttaaccctgagttgacacagcacatgtttcaggaagcacagggttgggggtagggttacagatcaacagcatctcaaggcagaagaatttttcttagtacagaacaaaatggagtctcctatgtctacttctttctacacagacacagtaacaatctgatctttcttttccccacatttcccccttttcgacaaaaccgccatcatcatcatggctgtttctcgatggttgctgtctctttggagctgttgggtacacctgcagactaacaacagacaaaacaggcacacaaggattaatatgaaatttataatcgtagtacttccgatggtcttaacccaagtgacagggttaagatttgcgaggccatcagcaactcctgcgattgcctcagttcctggcaccaaatttaaatgggcttttgatgtttcaaaaatttgttcctttaatttggaaatgtctaaagtgagattatcttctgttccctgtagatggcatctgaccatgtcccagtgatgctcagactcattataaacttggggtgtaatacaaaaatctgagatattccagtcacactgtaactggaaacgatggtctaagttcataagcctgtctcccatccaaatgacagtttgtctaagatcattaatttggtttgccaatttttgatcaataccagattgtgaattccacaatcttgtagaatttttttgccaatcattaacaaagtttactgactgaacagaagagtgcaatgcaactcctgccatagcagccgtagctgtgactgcaattaatcccataatcactgtaattaaagtaaaaatgaatcttttggatctatttaaaatggcttttaatacttcagtcaaaatatggacggatggcaaggcctcccacggttggtccatggacatagaaatccacacggcttctcttgccctcaccagcagaatacactgttgccaattaaaagttgaataaatgcaagtaaacaatctgcaattttcacagcttatagtttgagagtctggtttaataactatatttcctacaactagcatataagggggctttacacaggtttggaaaggaactgttagactggaatttaggttgatagtataaaatagcttacgatctcgtttctaaagtttgatttctagaccaaattctaatgcagtatgaggccacagtaagcctccataattctggatgttcaggaccagaaacaggacttattatttttggtcttggggtagagattcctttttctccctattcccaagggtagaaagactgtaattttttagcttatgtttgtctaaactttctgttaagtcgctatcaacagctagactcacttgtgcactgggacacgactgagtttgtcctgtgcaattgtggtagaattgacctcgaggtgcccaatctataatagttccgaattcactgttttgtaatatcaccgcactattggccacacattcttcccaaactaaaacttctgtattttttgatcctttgggaatttccttggggcaaggtttccctttaggtctaaattttaatgatctttgataagaaaagtcttgtaaataatttacccgtggcctgagtgacatcccgcttaccatgtgataagtgaatctactgatgggactgacagtaggtacttctaccaaccaattttggactgcaggcattaaacatcctggtgctctccctaggcagataggaggataatgatacccaatggaaatatttatcatcatcccttcttcctcaggtttggcagggcaatgatcatctgtggggccaggtacccatacactatcattaacatatacttcaataggattatccatccatgtgactggtgtttccatctccgcggtggcgcttttctttgcatctccgatgggttcatcgtagatcttcaaatgtctagtgggtatccaaacaggaagctgattttctcctggtgaaacacaagcaaaacctctcccccacgtcaccaccttccctatttcccatgtcttatttttattatctttccaccaaatcagttttccttcatgtgggctgttctttttaccagtaaaatgttgttctgcagaagtagtagtctgatttctataaatgtttaaaaaatttaaagtatagagtgctagattaagttgcatctgaggagtggtacattccttactgtctcccccttctttttgcttaactgagttttgagtgttctattagttctttcaactatggcctgtctgtgggaattatagggaattcctgttgtatgtgaaactttccactgatgtaagaatttttggaaagctttactacagtatcctggtccattgtcagttttgatctttttctggaactcccattacagcaaaacaagataataaatgttttttaacatgggaagtactgtctcgattatctggccctaaacaatgtaaaatcacagtactttgatacacttctgaggctgtgcctacgctgacaagccctgtaacagcctttagtttaggccaatttttggccactgatttaaagcaatgatagagacatctgctccagtgtctactaacccttcaaactgttttccttgaataatggccttacacgcaggtctgttctctgagacccgacttgcccaatatgcagcctttcctgttggatcagtgcttccaaaccctcctgttctttttatctcactatttccaaccttaatataaggcaggagtaataattgcgcaatcctgtctcctggactggcactccaaggaattgaagagctaataaccaattgaatttcgccattatagtctgaatcaaccacatcagtacgaatttgaactcccttcagacttagacttgatctacctaagattagtcctacagtcccctcaggcagtgggccatatacccctgtggagattttttgtgggggctcccctggaagcagagagactgcctttatagtacataaatccacagctgcactgccgcttgtggcgggggacaattgttgtactgtggtaactggctcattccctgaggcacttgggacagtgggggttgttgtccctgaaaaccctgaggaacaaagggctgaattgggaatgccccagtttgttgcggggcctgaggctggcccctttgctcattttcccgacaatggttgcccatttctatcaaatttagaatgacattgactagcccagtgttttccttgtttacatcttggacataagtcaggtggctcttttttatttgagactgggcaattcttttttagatgaccaatttgatcacaattataacatttccctccaaatgttctaacttgtcctcctaaagcaactcctgttattgtggaataaagtttagaaaatatccaaagcttatcagcctgtaaattctgggtagttcagttgtctaccatgctgttaattaaatgaaaacatcctgttatttcagggtccttccttgacaaagtactatacagctgaagaacatctcgaatacaattttggtgggaaaggagccaattgatttcaacagaatcagatctgagcttcataaagtctttgaagtgacttcacagagacgcagacatgtgcacttgaagatgctgccccttccctggtacctagcaaagctcctgcctctttgtgtgcgtcactgtgaaacccccacccttctgcctcgtgctaaacgcacacagtatctagtcaggggaaaagactgcatttaggagatagaaaatagtttggattacttaaaggaataaggtgttgcctggaatttctggtttgtaaggtggtcactgttcttttttaaaatatttgtaatatggaatgggctcagtaagaagagcttggaaaatgcagaaagttatgaaaaataagtcacttataattatgctacctactgataaccactcctaatattttgattcattttctgcctatcttctttcacatatgtgtttttttacatacgtacttttcccccttagtttgtttccttttattttatagagcagaaccctagtcttttaaacagtttagagtgaaatatatgctatatcagtttttactttctctagggagaaaaattaatttactagaaaggcatgaaatgatcatgggaagagtggttaagactactgaagagaaatatttggaaaataagatttcgatatcttctttttttttgagatggagtctggctctgtctcccaggctggagtgcagtggcgtaatctcggctcactgcaagctccgcctcccgggttgacaccattttcctgcctcagcctcctgagtagttgggactaccagtagatgggactacaggcacctgccaacacgcccggctaatttttttgtatttttagtagagacggggtttcaccatgttagccaggatggtctggatctcctgacctcgtgatccacccgcctcggcctcccaaagtgctgcgattacaggcatgagccaccgcgcctggccgctttcgatattttctaaactttaattcaaaagcactttgtgctgtgttctatataaaaaacataataaaaattgaaatgaaagaataattgttattataaaagtactagcttacttttgtatggattcagaatatactaaattaactttttaaaacacaacttttaaaaaatgtatcaaaataataaacgtgttctgatatttttaaaataagtgaccttgtgttctttaaccagtccacatctttagagaacaaaaatgtgttatgatattatgggccatgctaatgacctctagaaaacatcagaatatttctggatatttaataatagctttatatatgactaatgctcatttctatgtaattctgtttaatagttgctttaaaggtgaattttgccacatttactttgacagcagtataaggagtgagatagacatgaacctgaatttcaatttaaaatcatggaagagagggaaaaaaaaccagcttaagaaaaatcaactgataaactgcaagaaaaaaatgcaacttacatcacaaaagctaattgctttattatttagagagtacttaaaaattaaagaccaaacttctctccacccaacaaaaatgggcaaaggacatacagctaggtcaccaagaaagaagggcaaataggtggtgagtacatgtaaagatacttgataggacttttgcttagttgaatctttagcaaatctcttttatttcttgggattttgaagaagtaatttttaaaggaggactagaaactaagtgattgggaattggcctttttagaattaaaatttcccattacaagaaaaaaaaatcctgtgttcttttttttttccagaatggagtaggtcagtgagcaatgtgattaataaatatttcaatgtctgtgacttttgatttattttggagacagggtcttgctctgttacccaggctggagtgcagtggtgctatctaggcttactgcaacctcacctgtcactttttaattgcaagaaagctgaaaggtttttttctattatatcagttataatgagaaatactgtatatactaactatgagtaaaatactatattgcctaacttgtattattaagcaattctgctaacctgtgaccttacattttcatctgaaaagcaggggctggacaccaattgccctatgaagctattgctagtcctaacattctttgttttgtttgcttttttggcacacttaagtgtgtactatgaagtttatgatgctttaatgaaattttctgtctctaccattgtaatgagaaaggaataaaatactttattttgcaaatctacttatggaatatagttctgtacctgattgttttcataatccctgtgttgatgtgtaatgccacagacatgctcttgatagtaacaggaaagaaaatcagacacagctaaacataaaggtcagttggctggcaggtgcttagcaggtgtaaatagaggcccattcatgctgctccacttgctcctgaaaagcataatgtaaatacagtatactaattaggaggcaaagaaccatctaacatggttcttttttttttttttttttttttttgagataaagtcttgctctgtcaccaggctggagtgcagtggcgcgatcttgactcactgcaacctccgcctcccaggttcaagcaattcccctgcctcagcctcctgagtagctgggactacaggtgtgcgccaccacgcccagctaattttttgtattttagtacagacggggtttcaccatgttggccaggatggtctagatctcctgacctcgtgatctgcccacctcggcctcccaaagtgctgggattacaggcatgagccaccgcgcccagccctaacatcaaattttaaaagagttggccacagtttaatgacatccctgcacaccagcctccacccatactgcccttcataagccccttaaaggagatcccatagttctaaaccgggtccacaaacacacatatcctcattctctccttttcttctctttggcagtttgacaaaatctttagggggaattggaggaaacattaatctcctaaatcaacttcattcaaagctttggcttcaagttctacccgttaaggcctcaggaagttcattgtcgacattgaactcagtcactaaaatgacctcaaggctaagggatagaccacagctccacttcacaagtaagcttgcaacacctgatttaggaaagtttgctgtgcagacagttgtagctcatccattttacagaccgatctcgatttgtttcctagggtctaaaattatttaaatcaaaatctctcagaaatttctggacatttaataaattcatgctggaggagaactggcagagatatgttaaatgcacttgaccacaagaaccatttatttcatccaatatttaccagctattcattgtacacttactacagattttggcactggagatattataagaaagctctaaccctgacttatggaacttatcccaaaaaataggaaacaaggctcagaaccattcaaatgaagcttcagttaactcaaataaaaattagttttataaatttaatgtgaaagtcttcgagtatattaagaatggcttgattaaccccagggatggaaattttactgattgaaagaaagtttcaataaaataccgatcttcgaatctaatctgacacctgaaactaggaaatcaaacactagccatattttttcttctattctttataataatttttctcatgagaaaaaggtatctttcttccaagcctgaaaataaatggagaatttttaatatctattgatgtggagaaaaataaatagactatctgctttcacaaataagtgctggcattgagccacagaacatgtctgtcatattgctctttcacaccatacattaacaggaataataatttctcctcattgagtttcctatttactatccccttaattatacctcctttaattactgtcatagagtgtctgaattttataatccaagatactaagatgtttatttgatataccaccagactcaatgtcttgtattctatgccaaaaatttgaaaatgtttgggaagaggaaattccgtggtttggtgaacccagaaagtcttcagtacatctcagttatagaactgtattaaatacatttaaactctataattccataagacccattttaggtttatacactaagcatccaattcctcactatcctctcatacaaaccctgtgtaatacaagttctactcccataattctatgaacaaaacaacaattgatacatagatttgatttttaaaatacattttctttaccttattctaagtgtaacatagggtcaacatagaaaaagaaaactgaaaagcacaaggaaagtgaaatatctataatcttaaccattgttaattttgttgtgttccaaattagtgtatgtatatatatatatatatatatatatagcatttttgttttaataaaaggactgccaaaatgcacatgccaatttggactctgctttttccacttacaatgatatcatagtttctcacatttggtattcttttgcaatacttgctgcatagaattccatcacacaaaggtaactgccagaaattccttattacttttgctagacacttagggtttacattttttacaaaaattataaatctttgatcacagctctgatgatttctctgggaactgagagcctaacacaagtcatttccactttaagacttttaacattctgaaaagttatgttacaaacagagtgctggtccccctgcaacatgctcactcacattggctgacattttaattctttgccaatctgaggggaagagatgtcaactttttttgtttgctcttttaatgccagtcatgttcccttttttttcccccttttaccagtcatactggcttactcagaaccctacaaatcaatcctgctcattcttaattttccaacattgttcctgagattgtttcaccagaaaagttctcccccttatccacttcgcctaacaatttctacccatcccaatcctcctgcatttattgcttccaggaatttggcacttaggacacccttgtccttacattgttcatgcatgtatatttcgtcttcaataaaacatttagttgctcaagggcaagggtcccatagagtctcaatatgctaacggcctggtgttgcttaataatttagattctgacgggtcctctccagggaggggagcaaagggcaaattatcttaggggctgggagtgcagaagccaaacctttgagactgtgaaaagaagacggcgccgagacgattcagtagcaggcattcaagcaagaaaaactcaaatattgttcccaataatgcctgactaatgccaaataccaagtaagggcccaggcagtcctgacagcctgcagtgccccaggataaaactaaccctgaggggtgctagcccacgataaccccctgccagggctctggacacgccctgtctcctcgaaggccaacgggctgcccctgcgcgccgaggccccgccccgcggcccgccgattggccccagccgccccggcgctaagactcaatttcacactacgcgcccaggccacgcccacctgtcatgcggccctggaaactgtgagtttggggattgttgtgtccactaaccggactcagaagggacttccctgctcggctggctttcggtttctctgctcacctccggataaatcacggggtctcccgcgccgctcatggcgcctcccgtccgtctcgagcgtccctttccttcccggcgctttcctgggttgcttctggcggccctggtgttgctgctgtcctccttctccggtaggaccccggggtggattcgcgcgtccgcggcgaggctagagctctgctcagtcagtcgggcaggaggcgcggggcgaagctcactgcacgtcgtgcctgcttgggatagagagcgaggccagggttctccgaggggtgccgtgctcagatcccgggggtatgtggcgggggatgcgggaaccacgcagaagcttgtttggtggcatcgtgtgcgcggccgacatttacgcaggatctggctgcgttcccaaaagaagcgtgaatcgtgttttcgggattgagcccagtcagcaaggggagggcttactgggcgccccaggtgagggcttgctctggagtgcacaggtgcgtgggattgttgctagagcccgtgctgtgcccgtggtgagagtttgccctgtgttcccttggtgccttggtgagtagggtgttcattagggcttggacagtacccgcggtaagggttgcagtgcgtctgctgtgccccatgggctgggctggcctgggctgggctgggcgagcaggggcctggccaggtgttgctgggagcgtgctgtgcgcaagtggcctgtgtgcggagttcactgtgggcaagacagctcactgtttgctttgagtggagcgagcgcggactctgcggctagggagggcatgttgagtgagagcaggctctcagtgcctggggttagagaggtggtaagggcgcaccatgcttttagtgccttctgtgaacagtgtccgtgttgcctgagatcgtattggtcttgaattttaagtggctgcttttttggggggtgggtgggccatcgagtcatcttcctgttcccaaccaatatagacagtatctgattccattgcctagtggctttttgacattgttttccttcttttcattagtttgagtcatatttgagagatgtgaagcaacctaaaaaacactggtagccaaacctagtgagaaattagtatcctaacaaaggaaggcagataatgttaatcttgttttcccctacagctcataaactgaagcttaaggcctatcccactgttttgtatttcattgaatggaatcaatatttttaaaaatgcatgctaggccaggcccagttgctcacacctgtgatcccagcactttgggaggcccaagttgggtgattgcttaagcccaggagttcaagatcagcctggacaacatgtcaaaaccccatgtctacaaaaaataaaaaaattagatgggcatggtggtgtatgcccgtggtcccaactactccagaggctgaggtgggaggatcgcttgagcccaggaggagaagactgcagtgagctgtgatcatgccactgcactccagcctggatgacagtgtgagaccctgtctcaaaaaaaaaaaaaaaaaaaaaaagccaaaaaatacatgcttaaatacaggcttattgtgcaaaatgaacaaaataaaaggacaactgtttttaatattttgttatatttccttctgactttattgtgtttcatgtgtatctatatccaaattatatttaggatcttattccatgtacagattgtacgttgcatttcttctcttaggaacattcattcaacgaatatgggtcttgtatgtctggtgctgttacactggtaggtaataacagacaattcctattttctttatcctttttttactatttgtttacacacgtacatgcaggaagataagcagggactttttttgctcattgttaagtgcttaatgccgggaacacagtaggcaatcaacagatgtttgctaaaatgtattgggagtggcagacattaaccaaaacataatagtaacaaatatattaaccagggaagtgttctggaggaaaggagtataattttctgacagcatttaacaaatgactggggggagggaaggctttgcttctcatcaaacagacaaaactctgccactttggggcatctgtgctttctgttccctcagtcctggaacgttctccccatgacctgctgcataaatgggctgtttcttctgcaagctcagctggaatgttaccgcttcagagaccttcttggaaccccccaactcaggttgaacacatacaacccagttcaagtacctcttgtaatcacccttttaaagtgatcttttctgttctctgtctctccccatcagaatgcaggaatcttctgtcttcccccatttgtggttccaaaagccccatttgtttgcttctgtatgaaccctaactcagtatccatatagacatctgttaaatatcagaaaattaaatatactatttggctggggcttagagcctaggaaaaagtccctcctgcctccaagaggaaggttctttaaagagctatgctcaggatggtctttctgttgtacctaaaaagctagggcagcagcagctgagggccagaaaggatctgtctcccctgtttatgttgactctgcagggcttccagtacttcagtcttgcatctcactgatcattaaaacgttcattttgaaggagggtgatgggattagggagcagtggtgttaagaagaaaacgaaaggacttttttttctttttaaagattaatgtttagaataggcttagtactagaagtacatacagcctgggcatcataaggagagcccacctctacagaatattaaaaacaaaaaattagccaggtgtgatgttgcatgcctgtggtcccagctacttgggaggctgaagggcgtgaagggggaggatcactggagcccccatggtcaaggctgcagtgagccctaatcataccactgcactccagcttgggtgacagagtgagacccggtctcaaacacacacacacacacacacacacacacacagacacacacacacacacagaaaaaaaaaaaaaacctggaagttgaagaagataatgaaagcaatttgaaatagaggaacatagaattataaaatgaatagggtgcaacatggaagataacaaaactaaaaatgaagagaaggaaaaataaggttaagtttgaggttgatagggttaaatcaagacaggtatgaaacctagagaaagtaaaaatgagaactcacgatgctaggcagagagaatacatgaattaaaataaacattcaatttttggagcaactcactctcacaaagataaggttttgtaagcaggtggtgctgtgcatgggagacctgccctctcaaaggtagttgccaaatggttccagatagcagaaggaaacatgtgtcaaatttcaggccagtctcattcattcctccagaagaggagctgcttttttggacaaaacccccgatctcctgttgtgtgtggtctcttctgcctatttcaggtgttttccttattttcaatgaaagaagccaagaccaataagttcttattgcttcttagtttcctcactcggcatactacaatgcaaaaagagcagtccatatctggtcacctgccaggataccagaagactgggagataggcagcacaagaaatggctaaatcttctttctccattgttctgtagaatgattattttcaatatgaaattgattacaatatattcttcacattgttttgtgtttgacagcagtggactttgagtaccaaatttttttcgaatagctactatgagggacatattgtgctgggtgttgtggccacatggatgaatggagtcggccttgttaactattaaactcaaaaacacgtgataattacctgagagatccatgcaggggagagtccaggggaaggtgactgatcactgcttcccagggggaggcagaaaatgcttcttggaggagatgatgggtggattaaagaagacaagagctgagcaggagttgtagctaccggccagggaggaagggtattcagagcagaggaagcaaggtgagcaaaggcaccaagatgtgacactgctggactgccaagctattcagtgtggcagagtagggtaaaggagacaacaaagaagggagaggaataaatcacagggtgagcagttctaaaaagcaacagtcttgtcaggaataaacaatcaccatcgtaaactcagactttgatattattccctgtccttttagggcagcttgagcccttttgtttgacttagcacaacgtgactccaaactagggttgttttaatttcccaagacacagtagtaggcaatttcttgaggacctaattgcagatagagtttgtcggtctcagcatgtgggagctccagatgaatggcagtaatgggaagcagtttggtagtggttcagcagtgtggcctgggaacctagttgactggcctgcctcctgggtctgccaacctaactggaatgtattcttgggttctgattgtgatgggatttaaaagtctctaagctatgttaggaagccttagacattatcctgaggtcattggagagccatcgaaaggtatctgtcttggaaaaaccttgattaccctgtcatataaatactgctctggtaatgtgaaaaatgaattgaatgaaaggtggcaagataggtatggagacctatttggttatgtcgtggtaatccagataagaaatgatagtggcttgaatgaaaagtaaaggatacaactacatagaataaacgggcatttcagttgtggaaacataacttgtttggggggcgtgtgtgtgtatgtgtatgtgtgtgtagagtcaaaagtggctcttgggtctccctttgttgtttgagctagagtgacacattccaagtagagctgtgtggggaggcaattgaatatgtagttttggcaccccagctagagatctgggatggagagatacccagctaggaggcagctggttatcagtggtaatgaagtcacagaagtgtatatattctcccagggggacctgcagaatggaatcacaggaagtcctcctacagactcatcagggatattaccttggtatgagccagaggacaagctgaaaaccagagtggtttgctctcctaaaagccaaggagtgagaactcttcaggcagaagagagtgagggcagagtgatcagtagctctcacgttatcaagagggtaattcaaactattaaggaagagactgttaggaggagtttaacaaggaggaggccctttaatgactcagaaagtagttgaagtaattttcatagacctagaaatgagtgggaagtgagaaataaaattgaaatatgtagatgtcagagtttatgttttgtggaagcaaaaaaggttttaaatagattggatagtgggagaaggagcaagatggtcaggtttcattgccatttcacttgtagtcaaataccatgaatttctggtaatactaatctgggcagggctgtgggtatgcgtgtacattagttaattttttgcaagcaggtgtgaatgtacagaagttgaacagttcagtggatgcagtgtagatttttttttttttgagacagagtctcgctctgctgcccaggctggagtgcagtggtgcaatctcagctcactgcaacctctgccacctgggttcaagcaattcttctgcctcagcctcccgagtagctgggactacaggcgtgtgccactacacctggctaattttttgtatttttagtagaaatggggtttcaccgtgttagccaggatggtctctatctcctgacctcgtgatccgcccgcctcggcctcccaaactgctgggattacaggcgtgagccactgcacccggcccagtgtagataattcactttactaaaactcacctggaactttggggaaatttctgactgcacctatcttatgatataatggcacctactgttgaggtatagtattgtagcttaatattaattataatataaaatatctagaaaaaataagtcaagatactgtttttctgggggtaggcatgtttagtttgaaattttccataggaagaaattcagtcctctgaaaacgtattgccaataagtgcattgcaggacatgatatataaagaaaatattggacagtgtatatatggagaattttagaatttagaatatgacatgaaatgaaggtgagatttcacttggttagaattttcttgaccagtctctcaacctgaggcaggaccatgaccagggagtaagaaaagaaatgctccttggagatcaaaatagatctatctactttggtccttccactatagaagaggcctttgcattctgttggccctttaggcttttacttgatgtctccatcatcttattttgcaagcccacagataatttgaggaagatgagttgccgcagtagaaatgatagggagaaaaaaaaaactacaaaaaacagaaataaaaaattctaaaaccacagcaatatagtagctttattataggacatgctggataaacaatccaacagctacctcagggagcttctgagagaatgcatgatgcaatgatcagtgaggcaagatcaaattgtgtttgatgttcaagaaaggaaaaacaattcatgtaagtctatccaaagtagtaaatgttttatatttaagtagtgtatattcacttgtcagatgctcagttcacttatctgaaacctatgaaataaagtcttatattttagaatatttgagttcatatttattttaatctatgaaatccactacatttacttaataatcacctcttaccataacatttcttgagcacccacaaggtgggtagagtgtagtagaaaaagaagaacatggtccttgacccccaggaacttgccttttaagagaagacaccctgaagtgacaagctgttataagttagtgttttaaactatggaagaacaatctgagcagagtgctctatactgtagatgacttcttagaggagaagttacttttgaaatgaatttagaaaaatgtggagaaagatgcatccatatatattttaagatcaaagacattaatgctgtctcttcagtttattgtcgaatgtttattcccaaacaaaccaaaagctaataggatgttacttaaaacatgcaaatcccatttcctccactactaccagcactcaggtaaaagcatggaacagtcatttaaaatcttgccaagggccttcctattttttctgtactacctgctgccagaccacagtccatggctgatgaaagtgatatcagtacttcatcttcatgttcctattctcttatccctagatgcctatgaggagccaccaacatttgaagctatggagctcattggtaaaccaaaaccctactatgagattggggaacaagtagattataagtgtaaaaaaggacacttctacgtacctcctcttgccacccatactatttgtgatcggaatcacacatggctacctgtctcagatgagccctgttatagtaaataaactagcctttttttttttgttttctgcttgctctagagatttgcacacattttagggtacatattccactatggagatgatgatttttttttcttgtgaaatgaggtttaagatagcaatgcatttttgcagactttgagaaattgaaatctccaagaaatctttttcttggcaatagattgcctgggtgaacatgaaactgaaatttgcccttataataggtaaagaaagaaaataatatgcccatgcattcaaaaccgcaatgcagaattttgaccttgattccaatctgtttagaaactggattgaaaaaatctcaaaattattttcttttaggaaaaacatgtccatgtataggtgatcctttacatggccaagcagtccttgcaaatgggacttatgagctaggttatcagatacactttatttgtaatgaggggtaagtaagttcctccttagaggaaataaggaaaatgttagtaattttattttcgttttgcttctcttcttaagctttcatataaactttatttaattttgctttctatgtgacaagttatacttctagccaaacaactcttggatgttttatggagacagcaaagacgtagagtaaatagaaattgatattgaaggaaagcataactacttgctatttctgacaataagtctgttgaaagcattaagaatgtagtaatcatgagaattcatccttcacaactgagtgtcccctatttaaatctgcaaactcttagagttaaagtagggctgacagaaatgagaaatagaattgccaactaaaaatatgcttgtatccagatgactctgtaaagtgtgacctggttagcctttaccatcatgttgaacaaaagctctcagttgaaaaaccttatttctgagactgctacaatgtgaagcatctcaagaacaggcactgagcactcggtaatagcctttgttctgcaggacttttaaagtcatagatattggggatactggacatttaagtgaaatgtgcttttagagagtaaatgtaattttcatagattttctattgctataacacaatacgtgagactagataattcataaagaaaagaatttatttggctcatatttctggaggctggggaattcaagggcatggcagtagtacctggcaagggctttcatgctgcatcagaacatgctggaaagtgaaagggaaattcagcacttgcaaaaaagacaaagcacaagggaggggctctcgctttataacaacctgctcttgtggtaacgaatccaagcctacaagaatgaagatccactccctcaagaattaatgaagaccctctagaaaggcattatccctcttaatgccctaatcatttctgaaaggccccatcacctctcactgctgttacactggcaattaaatttcaataagagttttggtagagacaaaccacattcaaacaatagcaataatacactataatatataaacaaagtgagtcttggaggaaaagtgcactgtgaccatgtaaggcagtttcactaagagtttttaaaatttggtcaagtagaaatattggagtattcaattaatagttacatagagcttgctaggcactatgagggataccaaaagtttaagacatggaccctcctaaaagaagttctaaccttattgagaaacaatatatactgagaggtatcaaaccaaaatactaaatgagaaataccaaataatagaattaatcatgttattacactaagagtccagaaggaggagagattcctgtgaatttaaatcagggaagatttcactgagtataggtgtatactcaatgaaagtattcctatactcaatgagctactcctagaaagacattctgttctaaataatattaataggagctaaaactcgtgtagcactcactatgtgccaaatgctaacttatctaatctcctaaacaaccccacgagctatgtactgttatccccttttaatcaattaggtaactgagtgagaggaactttaagtgatttacccaagctcaagaaactagtaagttgggaagcagagactctaatccaggcattccagctctagggcctgttctctctacagtcttgtccttactgagcaaagtcgtgtgagaaaacgcacagaaatgaatgtgtaatgtgattgcaggaggcagcaaagaggctgggtggaacggcacagcagatttatttagatgtttttgctctcggccaatatacgttcaaatagagaaactctttatttgattaaattgcagatttatttagcactttcattatatagtatgttgtttaagaaaccacccccctcaaattactgcagcgtagaaaataaaccatataaaaagttccttcattattatgtgtcttattaattgctatacaaaacagtaaccctttcttttcccatttagttattacttaattggtaaagaaattctatattgtgaacttaaaggatcagtagcagtttggagcagtaagcccccaatatgtgaaagtaagtaaattcttttttttttttttttaattcagaccagtagtcctcaaagattttttgcctcagggcaccttttacattttaagattaacaaagatcccaaagaggtttcttttatgtgggttatatctgttggtatttatcatattggaattcaaactgagagattttttaaataagtattgattctttttgtttttgtttttgtttttcctaagagagggtaccagtatgtttcccaggctggagcacagtggcacaatctcaggtcactgcaacctcagcctcctgagcagctgagactacaggcatgtgccaccatacctggctttttgtaacttttgtagagacgtggttttgccatgatgcccaggctggtcttgaactcccgtgctcaagcaatctgcccccgtgggcctcccaaagtgctgggattacaaatgtgagccaccccacctggcctgattaatttgtaagaatagatgcaatacaaattaacatatataacattttttaatgaaaaataacaattttccaaaacaaaataaaattagtgagaatagtggcattgttcacattttttgcacatctcttcaacacctaacttaaaggaagacttggatttgggctgttgtgtaatcacacaatatgtagactttggaaaatatcactatacacttctgcccggcgcagtggctcaggcctgtaatcccagctctttgggaggccgacgcgggtggatcgcgaggtcaggagatccagaccatcctgtctaataccctgaaaccccgtctctactaaaaatacaaaaaattagccaggcgtggtggtagcagcctgtagtcccagctactctggaggctgaggcaggagaatggcgtgaacccgggaggcggagcttgcagcgagccgagatcgcgccactgcactccagcctgggcgacagagcgagattccgtctcaaaatcaatcaatcaatcaatcaatcaatcactatacacttataaggatgagagtgaaaaaagacaatatgttggtggtattgtgaatcaccaatttagaaaatggatatatttaaaaattgcaaaggatttctcagctagcgctcagttaagcatattttctcattaaattgtcagcatttcttgtgataactagaagaaaacttagcatggccttgcaaataaatataggcgtattaggccgttttcgtattgctataaagaaatgcctgagactgggtaatttataaagaaaagaggtttaattggctcgtgattctacaagctgtacaggaagcatgatgctggcatctgctgggggtttggggaggcctcaggaaacaacaaccattgggaaaggcaaagggggagcaaggtgtctcacatggcaggagcaggagcaaggtggggaggacgggaggtgttgcgcacttttaaataaccagatctcccaagcactcagtatcacgagaacagcaccaaggggacggtgctaaaccattcatgagaaatccacccccatgattcagacccctcccaccaggccccacctccaacattgtggactacaatttgacatgagatttggtggggacacagatccaaaccatatcaataggtatttacactttaagaaaatgagatttgttctgaaagttagttactacattaatggtttgaatttgggatgatatatttgctcatagaaaccttcttttaaatccatattgaattcacaaccagcttgtagaaaccctatattgacaaattcactgaagacacagaaattttactaatgctgccttaatcttttacatttctttcctctttttcttcaattttaagagattttgtgcacatgacctccaaaaataaaaaatggaaaacacacctttagtgaagtagaagtatttgagtatcttaatgcagtaactgatagttgtgatcctgcacctggaccagatccattttcacttattggagagagcacgatttattgtggtgacaattcagtatggaatcatgctgctccagagtgtaaaagtcacctttcaatttatttccttcttcatctgtaagtactctggaaatattttgtaaatagttttatctacaaataaagcaggtgtatgtgcttcctcctcctgtgtaattggatctaatttattttaatacaggtcaattcaagccaaaaaatagttctagctagagttctctatttttcacccccacatgttcttgggatttcatttcatacagtgtgaactactgtgtaatctgcatgagttagaagtttttgtttgaaagaccaaaaaaaataataaatcaacaaacactggcttaaaaataagaaaggtggttcttgtattacaagaaatctaagagttctggctttggtagtggtagactgtaacagactaatgctctcaccaataaaaatgataaactctggataaaaaataattttcttaaagaccagagtgaccaaaagtatgaagactccacaggggacttgcccgtttaaacaaagaaatcacagaataacagtgatttaaaagtatatacttcccaagtatgcatgaaacattctccaaagtagaccatattctagacaataagacaattttccacaaatctcaaaaaattgaaatcattcaaaatacattatctgatcacaacagaatgaaagtaggaatcaacaacaaggccaatccccaaagaaatgaaaagtatagaagacactcctaaataatccatgcataaaaatagtagtcagccgggaaattagaaagtgttttgaattgaatcataacacatcaaaatatccaaacatgtaggatacagctaaagcattgcttacaggggaatgtatagcataacatacttacgttagaaaaaaaagaaaagcctcaaatcaatgatttaattttccaccttaagaaactaaaaaagaagagcaaattaaatcccaaactagcagatgtaaggaaatgataaagatagagccaaaatcaatgaaactgagaagagaaaaaaaaaaatagagaaaatcaatgaaaccaacagttgctacttggagatcaataaaatgtgtaaacctacagccagactgacaaagaaaaaaaagacacaaattaaccaatactgagaatgaaagaagtggtggtcaagcacggcaccccagccagcttgaagaccctgcactcctgcagctggcaggggcagtcactcctggacttgtccttttagaagctccagctttaccacttgctggtggagcccaaccactgccgcagggtcctcatcaccaacacgcctggcagatccaagaggagatggcccaggatgggatgtggtgaacagcagcacccaagagtgtggggtgcgtgtggctccactgcctggtttctgcagagatcctgtgccagtgccctgtgcccgccacacaggagccagagggggagcaccatgccccccacttcggagactgctgcacgaaggggccaggtatcagacctttgctgtctcacctcagcactggcaccaggagccctgcaaagcagcatctgggagatggacagccagggggaaaataaaggaagctttcagaagtggctagatgagatatttgaaatactgaaaactaaaaatcccaactgcatggaagagctggcctcagatgtggtcagttcttacgacaacctggacacacagtgctgacccgcatgatgggatgcaccaagctgggcccctgcaacgcacttggaggcttggccctgccaccgccccacctcccagctccagctacaattgcagtctgacctgggcaagcaagagcacatggtggagatcctgatggagacctgagccacacgtgccacagtgctggccagacatggaggatgggatcccgccaagggaactctggccagcctgtagcccactgcccagccttgccggctcctctgctgattcctgcatggtctgcagccccaggcccattcccttccttcccctctgcagagggcaagccggaggctggtctcagcaggagctagggctctcctcaaaggctttctgaccttggggcaggcttgacatccccatagccctgcatccctcatcccttttcatgtctactggaggacagtgagccatagctgcagcaatcttgtttaaatttaggtagttgaattttttagaattaagttttgtatgttttgagcaataaattgtcttaagatatatattttaggttgcttcaagatagctgaataggaacagctctggtctacagctcccagtgagatcaacgtagaagacaggtgatttctgcatttccaactgaagtacctggttcatctcactgggactggttggacagtggatgcagcccatggagggcaagctgaagcagagcgggatgtcacctcaccaaggaagtacaaagggtcaggggacttccctttcctagccagggaaagctgtgagtgactgcctggaagaacagtacactcctgcccaaatactgtgcttttcccacagtcttcacaaccagcagaccaggagactccctcctgtgcctggctggggaggtcccacgcccacggagccttgctcgctgctagtgcagcagtgtgagatccacctgggatgctggaacttggctgggggaggagcatccgacattgctaaggcttgactgggcggttctaggctcacagtgtaaacaaagcgccagggaagcctgaactgggtggagcccactgcagctcagcaaggcctactgcctctctagattccacctctgggtgcatggcatatctgaacaaaaggcagcagacagcttctgcacacttaaacgtcccagcctgacagctctgaagagagcagtggttctcccagcacagcattcgagctcctataacggacagactgcctccccaagtgggtccctgacccccgtatagcctaactgggagacacctcccaataggggctgacagacacctcacacaggtgggtgcccctctaggatgaagcttccagaggaaggatcaggcagcaatattgactgttctgcagcctccgctggtgatacccacgcaaacaaggtctggagtggacctccagcaaactccaacacacctgcagctgagggacctgtctgttagaaggaaaacaaagaaacagaaaggaatagcaggtggtgatatcccctttatcattttttattgtgtctatttgattcttctctcttttcttctttattagtcttgctagcagtctatcaattttgttgatcttttcaaaaaaccagctcctggatccattgattttttgaagggttttttatgtctctatttccttcagttctgctctgatcttagttatttcttgccttctgctagcttttgaatgtgtttgctcttgcttctctagttcttttaattgtgatgttagggtgtcaattttagatctttcctgctttcttttgtgggcatttagtgctataaatttccctttacacactgctttaaatgtgtcccagagattctggtatgttgtgtttttgttcttgttggtttcaaagaacatctttatttctgctttcatttcgttatgtacccagtagtcattcaggagcgggttgttcagtttccatgtagttgagctgttttgagtgagtttcttaatcctgagttctagtttgattgcactgtggtctgagagacagtttgttataatttctgttcttttacatttgctgtggagcgctttacttccaactatgtggtcaattttggaataagtgtggtgtggtgctgaaaagaatgtatattctgttgatttggggtggagagttctgtagatgtctattaggtctgcttggtgcagagctgggttcaattcctggatatccttgttaactttctgtctcattgatcgtctaatgttgacagtggggtgttaaactctcccattattattgtgtgggagtctaagtctctttgtaggtcactaaggacttgctttatgaatctgggtgctcctgtattgggtgcatatatatttaggatagttagctcttcttgttgaattgatccctttatcattatgtaatggtcttctttgtctcttttgttctttgttggtttaaagtctgttttatcagagactaggattgcaacccctgccttttttttgttttccatttgcttggtagatcttcctccatccttttattttgagcctatgtgtgtctctgcacatgagatgggtttcctgaaaacagcacactgatgggtcttgactctttatcctatttgccagtctgtgtcttttaattggagcatttagcccatttacatttaaggttaatattgttatgtgtgaatttgatcctgtcattatgatgttagctggttattttgctcgttagttgatgcagtttcttcctagccttgatggtctttacaatttggcatgtttttgcagtggctggtaccgattgttcctttccatgtttagtgcttccttcagaagctgttttagggcaggcctggtggtgacaaaatctctcagcatttgcttgtctgtaaagtattttatttctccttcacttatgaagcttagtttggctggatatgaaattctgggttgaaaattctttcctttaagaatgttgaatattggccctcactctcttctggcttgtagagtttctgctgagagatccgctgttagtctgatgggcgtccctttgtgggtaacccgacctttctctctggctgcccttaacatttttttccttcatttcaactttggtgaatctgacaattatgtgtcttggagttgctcttctcgaggagtatctttgtggtgttctctgtatttcctgaatttgaatgttggcctgccttgctagactggggaagttctcctggataatatcctgcagagtgttttccaacttggttccattctccccatcactttcaggtacaccaatcagacgtagatttggtctttccatatagtcccatatttcttggaggctttgttcgtttctttttattcttttttctctaaacttctcttctcacttcatttcattcatttgatcttccatctctgataccctttcttccagttgattgaatcagctactgaggcttgtgcattcgtcacatagttctcgtgccatagttttcagctccatcaggtcctttaaggacttctctgcattggttattctagttagacattcatctaattttttttcaaggtttttaatttctttgccatgggttcgaacttcctcctttagctcagagtagtttgatcgtctgaagccttcttctctcaactcatcaaagtcattctccatccagctttgttcctttgctggtgaggagctgcgttcctttggaggaggagaggcgctctgatttttagagtttccagtttttctgctctgttttttccccatctttgtagttttatctacctttggtctttgatgatggtgacatacagataggtttttggtgtggatgtcctttctgtttgttagttttccttctaacagtcaggaccctcagctgcaggtctgttggagtttgctggaggtccactctagaccctgtttgcctggatgtcagcagcggtggctgcagaacagcggatactggtgaactgcaaatgctgctgcctgatcttcctttggaagttttgtctcagaggagtacccgctgtgtgaggtgtcagtccgcccctactgggggttgcctcccagttaggctatttgggggtcagggacccacttgaggaggtagtctgcccgttctcagatctcaagctgcgtgctgggagaaccactactctcttcaaagctgtcagacagggacatttaagtctgcagaggattctgctaccttttgtttgtctgtgccctgcccccagaggtggagcctacagaggcaggcaggcctccttgagctgtgatgggctccacccagttcgagcttcccgcagctttgtttacctactcaagcctaggcaatggtgggcgcccctcccccagcctcactgctgccttgcagtttgatctcagactgctgtgctagcaatgagcgagactccgtgggcgtaggaccctctgagccatgtgcgggatataatctcctggtgtgccgtttgttaagccattggaaaagcacagtattagggtgggagtgacccaattttccaggtgccatctgtcacccctttctttgactaggaaagggaattccctgaccccttgtgcttcccaggtgaggcgatgcctcgccctgcttcggctcatgcacagtgcgctgcacccactgtcctgcactccccagtgagatgaacccggtacctcagttggaaatgcagaaatcacccgtcttctgtgtcgctcacactgggagctgtagactggagctgttcctatttggccatcttggctcctccctcctattttattcttttcagagtgatctgttgacacctttactgagtttgttcctattgcaggactctttgattttctggagtgcaaccagtttgagtcttttgatgtaacacatttaaacagggaaatttctgctgtctgcagaacacgacctatatttctgtctcttccctgcctgcagtcttccacacctcataatgttattctttttttctctttactgggcagttttatctggcaatagcaactaaatttatagcaactgaaaggcaggaaaagtccttatttactgagatgaaatagaggactttttgcagggactcctgatcagcagctgtgcttatgactggagagattattttgatatgacggaagggattattgtcctgatttcagcactgctatctctggtttcactttccttgcagcagaagcaagagactaattgtaggaagagcattagcctgcgcagactatgcttaattaacatcatttctgtggtcttcagtttccatttagtttaatgagattgttgaactcaaatctcaatcactggattctaatttgtttatatatttcctatctccctaatattttaaaggatctaggggaattatgcacgttaacatagtaattagaataccattttataattcctataaaagcctgttaactggtagcctccttagttgagtcctgtaggttttgaggggcaggaagagatggtttttttagtggactgatatatgagcaaaacaagattgcatatgaatttaatactcaataaggtatccaggcttactcacatgctcctagtgggtatatgtactaatactaagtttgttgatacagtcttttgaaagagttaactataagcatttcataaagtgtttataaaacactgatctagcttagtgtttgagagcagaggagagaattgcttgtgagaaaaagtttataaaaaagagaaactacaggggtattttttgaaaaatgacaaatcaaaattcctcatgggattgtcagtcattttttgtcatcagtaagaggaagaataaatagcaagataatgatgttaaggtagatctaaatgtgctaatgtgaaaaaatgtccaggaagtcctaagcggaaaagaggaagatgtaaattatgtagtataataccacttaacagttttttaaaaagatacatatgtttaccccaagcacattacttttatgatttattactggttatcttctaggatttccattataaaatatgaaacgtagtgagcatttttttggtttttttttgagacggagtctcgctctgttgcccaggctggagtgcagtggcatgatctcggctcactgcaagctctgcctcccgggttcccgccattctcctgcctcagcctcccgagtagctggggctacaggcacccgccaccatgccaggctaatttttttgtatttttagtagagacagagtttcaccatgttagccaggatgatcttgatctcctgaccttgtgatccatctgccttggtatcccaaagtgctgggattacaggcgtgagctgtagtgaccattcttgtacatgcatccttacatacttgtgcaaatatatatgtagattaaattatttttttttctagttggagccttgctctgtcacccaggctggagtccagtgacatgatctcggctcactgcaacctccatctccagggttcaagcaattctcctggctcagcctcccgagtagctgggattacaggtgcgacaccatgccaggctaatttttgtatttttaatagagatggggtttcaccatgttggccaggctggtctcgaactcctgacctcatgatccacctgcctcagcctccaaaaatgctgggattacaggcgtgagccaccatgcctggcaaagaatgacactgggtgtattaaaaagtatgataagtgacatgatcacagtagacatttcctccaatagaatattgggagaaagcctaatggaaaccaatgaaaaataagaaacacacgtagcctttggaacatagcctttctcacctagtggaggaggagctgagacttgagtaagacagtcagatgaagtaaggcagtattcgggaatgtttgtgtgagctaagactatacatcctgagtgatacacgtgtgttggaccatgtatacatgggtctccattagtgaagccgcactgagtagagaatagttttctacctaaagcatctttactccatgatgaatcagttatgcatggaggagaaagagctaacacgtgtactgaaatatctgctacattatctactcaaccctaattctactcacctttctacagcctttgatatttagagttactccgtcctcacacaactctttccaactccagcactggaaacaattgactcctgtctctaccaaactgtacgtcccagattcttgtcttaggagccatagaactccaaaggtttatggctataactgtgttttgacataattggctttctttatagtcctacgtgatttacttatacattacaaaaaacagctctgagaagggattcataattctgaccagccaggcaaaggtgtatacatgatacataaagatattaagaacccctcatgactattcacaatagcaaagacatggaatcaatttcaatgcccatcagtgatagactggataaagaaaatgtgctacatatccaccatggaatactatgcagccataaaaaagaatgagatcatgtcctcttcagggacatggatggatctagaggccattatccattgcaaactaacgcaggaacaggaaaccaaatactgcatgttctcacttataaatgggagctgaatgatgagaacacatggacagatgtgggggaacaacacatactgggatctattggagggtagaggataggaagagggagaggattaggaaaaataactaatggtactaggcttaatacttgggtggtgaaataatctgtacaacaaacccccatgacacaagtttacctatgtaataaacctgcacatgtacccctaaacgtaaaagttaataaaagaacccctgcatggatatggatcatgtatttccattcagatcttcctttcattaattttacatgcccctcttcaacagtctcattgattcctgtgattttgaccatctcccatccattatcttttacaaaagtcctcttgtgccttttttggaagtccattttcataatcaacaaattacctatattcccaatcttttcctaaacattctcacacctcctggccttcactaaaccccatctgtcccatgcccacatctttctcagtttaaaaaacaacaacaatgaaaaactttcgctgcttaaccttgatggcgctatcccttccccacccaatggtttcctattgctactgtaacaaattatcttgtggtttaaaacaacacaaatctattctttcacatttcaggagatcgtaagtccacagtgagtcttacaggatgaaaaccaaggtgttgaaaagactgactccttctgaaagctccagtggagaacctgtttcttgcttctaaggggcactagcattccctggctcatggcagcaacactctgagctctgttttcatcattaccttctggtctattaccttcctcttataaggatccctgtgatcatatcaggttcacctagctactccaagatactctttccatctcaatatccaactgcaaagtcctaaactgcaaggtaacactcacagattctgggatgtaggatgaggacattttgggggaacattattcagcctaccacgcactcctccttttctctcattcttggattgttttttattgttattttttaaattggctcataatgattgtacacatttatgggatacagcaaaggaaacaacagagtgaagaaaaaaacctacagaatgtgagaaaatgtttgcaacctatgcctttgacaaggggttaatatccagaatatctgaggaactcaaacaactcagcaaaataaaacaaataatattatttaaaagtgggcacaagacctgaacagacatcactcaaaagaagacatagaaatggccaacgaatataaaacaaaatgctcaacattcttagtcatcagagaaatacaaaataaaaccagagagagatatcacctcaccctagttatcagagctcttatcaaaaagataaaagataacaaatgctgctgaggatgtggaaaatagagacctcttatacactgttagggaatccaaattaatatggccattatgggaaatagtatggaggtttctcaaaaaattaaaagcagaactaccatatgatccagcaatcccactactgggtatatacccaaaagaaaggaaaccagtatgatgaaaagatatctgcactctcacattcaatgatgcactattcacaatagccaaggtatggaatcaacccaagtgttcaccaatggacgaatggataaataaaatgtggtatatatacacaagggaatactattcagccataagaaagaatgaaatcctatcatttgcagcaacatggatgaatctaggggatattatattaaatgaagtaaatcaggcacagaaagacaaatcctgtatgatatcagtcatgtgcaatctaaaaaagctcatctcatagaagtagagagtagaatactggttaccagaggttggggtagggagagacaatgggagatggagagagattggttaaagggcacagggtcacagatacataagaataaattcatccttgaatacttaaccctctgccctacatctgtcactcctacatccatattcattgctaatcctggggctaactcttgattgctttcttctcactactaaccttaagaaaggaagtaaccaaaatccaatacatgagcaactgttcattccatctccaatatctttgttaattgtccactttatccacccagtcagggccaccatcaaacctcacttggatgtcagcaaaagctccctggctggtctcccctctccattattgctttaatctagtctccatactatacacagatttacattttttgaatatatatctaattgtccttccctttttaaaaatcttacaatggcatgacatctcaattcacgataaggaaattggttcttcacattccctgtgcactgtacacatcgcctgcaattgcccttcaacacagagagcaggcatttcattagctgaccttcccacacacattcttgcaaagaggaaaagtcaagcagggtgtttggaggtgagttgccatcatccaccgcctttgtctggaaggaagcgcagggcctcacacgcgggatccatcggaagcccaagcattgtcaagctctgctgctgcacctgggtcagcaaggtgggctctgccagcgaaactcgttagaaacaatgcaaatggggagtaaacatggccttgcccatgaaggggaagctggtcaaaagcattttgtcccggaaccccgcagccctccccatgctctgggcgcggagcacaaggattggtcactcctctttgcactgcgcttttcctcttatcaaatctggtttgtagatgtgcttcgggaggatgggggtctcttctccgagaagccgggagcctgttgggcagccggcgcccggtctccccttctgctgcggaggatccctgctggcggtcgtggtgctgctcgcgctgccggtggcctggggtgaaacgctggggggcgtggggaggcgcccgggctgacgaggcacccagggccccgcagagaactcgcgtgccgcgctgggctgcgctgctctgcgcgcccgggtccaaaggcagcgcgatgggtgggctgagcgcgctacctggcagggcggcgggtctgggatccttctgcgcactggagaccctcgctgcctctaggtaagcgtggagttcccacgtgcaggggcttaagtcgtgacgagcgcagtggaaggcgcagatgctgagcgggtgccgcacgaaattccttgcctttgtgtattcacagcctcggctggctatagccgagcgtggcgtcgatcctagcgaaacgggacttggggatccgacaaacctgagttctggtcctagaaacttaactgtgaggcaagttagcacacctaagtctgtttgctcttctgtaaaatggggacactggtatctctgcattgtggagttgctgcctcagtggcataaagcctgtcgagtatctaacacagggcctgtccccgagtccatttctatcccccaaccgttacctctgcactttgctcccagtggtgtttagacaagcagtcctagggatgtcctgcatggaactgtcctcgtcccctaccccaagccaccaccgccatcatcatgatgcacttgattgacagcatactttaagacagatgcatgccaggcacttggggattagaagagcaagggaagccccagaacatgcaatgtaaccgctgcaggtagaagggacagtagatatgtttacaatttgcattttagtgatgtgtttagtacaaaataaagcctattataactactatggaaattttgaggccacatctcttcctttttttaacttcaagtaggtaaacatcttcagttagaacccttctattattagttttgggctccccagaagtcttcttggttgcctagactcactggcaacatctcacttgaagtgacagtcttggttgttttggtcctgtctcttcctgacaactcagggttcgtccttctctgccactagacgttttgcattcattatttgagtgttccttcttctctaaaagagtaaggggaaaagaaaaccaagttcccccaagagttgttattaatatttgatcttcttaggcaccagaaagtaacctgtctagtgaagagatatgataaaacttacaattttatttttaggagagaagcatgcccagtaagttaagcaatctgttgtcagtgcttactgaggttctcacaataacctccaaatgtgaaacagcctaaactaaactacctagaaattttgttgctggagtaatttcaattttaaaatgcttatggatgcttccggtgtgcacagtcctttggaatttaaaagaaatgtaagagaaagagctatgctcccaaggtgtatgcatatagaagtaggtggtggagttttatgaaatctactttttaggaagccagtgttctggtttttccagactctgctacttaccaactggggctgtggacccagcaacttaagtcacatcactgaccttcagtgtccacgtgtataaaatgagcatgactgacatcctgatttctgagagaggtattttgaaaatcaggtggggtagtgcatgtgacagcgttttgtaatctgaaaaccctcatgcatgtctgaaaaaccatgactaagcagtcgtgcaggactgcaggatcactgaaaagggagaaatctcaactcctatgatcaggaaagggtgagggaaaagagtatgactttactagcacttgaagagtgaatccagaaacaggttgcataggacagtttatgggaatatttatatataaaaaataacagaggaactaggattgttttgtcattagagggtactcctactacccatgaagtggtatggtgctatttgaaagagaacttagattagctgcaaatagatattgcaaacttagggcaactactgaaaaaagtgaaaaaaagaagtacaattgatatgccagtaaggaagagtgaattgcatcatataaaatgctcagttaaaacaataaacggggccaggcgcagtggctcacacctataatcccagcactttaggaggcagggtagataacttgaggtcaggactttgagaccagcctggccaacatggtgaatacccatttctacaaaaatccaaaaattagccgggcatgatggtgggtgcctgtaatcccagctactcaggaggctgaggcaggagaatctcttgaacctgggaggcagaggttgcagtgagccgagatcatgccactacactccagcctgggcgaaagagtgagactctgtctcaaaaataaaaataaaataaaataaaggtcaggaaaagaatgcaagacaaaaaatagaaacagagaacaagagaagaaagacaacaaatagaaacaagtaacatattaaaccaactatatcaaccatcattttgagtgtcaatgatctaaaggcaccaattgaaacagatcatcagagtcgatcaacaaacaaaactcaactatatattgtgtactccctataagaccattttaaatatagacaatatatattaaaagtaaatgggtaaagatataccatgctaatgctagtcacagaaagcaggagtagctgtgttaatttcaaacacagcagacttcagacgaaggaaaattattaggaataaagagggtcatcatataatgataaaggggctaattctccaagaaggcataacaatatctaatatgtatccatctgacagagaaacaaaatatgtggggcaaagctgatagaactgcaaggagaaatagatgaatgcactatcatagttggagacttcagcacctttatcttttctgatatcagaaaagataaaggtgctgaagtctctttatcagaaatgggcagattcagcaggcagaaaatccataaggacatacttgaactcaacagcaccatcaatccacttggatataattgacatatacagacgacttcatccaacaacagcaaaagacattctctggctcacattcatggggatagaccacattgtgagccataaaaatagtatgctaattaagctttaccagggagtgtttaacatagggtagactctggcgccctcacatggtcctcatgtaggatctgatttggttttccctgctaggtaaaggtgcaagatagaaagaagggtaattccaatttgctttctgtgctttgtgatgtattctggtttacatatgctcggatgagtagatgtatgatttatattatctactgttatctaaaataaacttcacattcggacaggcaacatcaaaactgtcctacacagaaatactgggtgaagatcacttaataagacgaactccagaaaacaagaaaatggcagagttgacaatccctctcaccctccctgcaaagacacatgtatacaaatttcttttgtcagagacattaagagaaacaaatgctgtcaatctaatcacaactgatcacaacttgatgaaaccaaaaaatctagaaagtatcatgaagacagttgaaatacagctttacattcactattgtgaccagaggaactcactgtggctgttttttgtccccttagatgtcaactaatgattgtgttaagtgatcatgattaacagagcatttaaaatgtttattttatctgttttacatttcaaaaatttatatttaggcatataatttatatatttgtgtacatatataatttattactttatatttttgaaagtgcatgctctttttttaagctgacagacatgcctaagcaaagcaagtgcaagtctgttccttaaagggtaagtatgcagaatggaaagcagagtgtacttcgggttgacagctcatatttgcacagacatgaaagtgatgatgtgttaattgtgcgtatagcacagaataaatcagcttgctttgaatggaagatctgaaccaggagtgcatgaaattgggctgagtcatacaagaaaaaacccgaaatgagataacaaaatatacccactagaatggctaaaatggaaaagattgaccaaaccaagtgttggcaataaagtggagaagctggaattataatatactgctattcggcaggtaaaattacaacataactttagaaaatagttcaaccgtttcttaaaaccttacacacacacctgtcatattactcagcattttactcttaggtttttacccaagagaaatgaaatcatatgtccacaaaaagacttgtacatgaattttcataacagttttgtttgtaatagccaacgagtgggaacaatccaaatgtccctcaacaagtgaatggataaactaaattaacatatatttatacaattgaatattacccagcaacaaaaggaaacaatttgtatatgtgcagcaacctagatagaactctaattatgctgtgtgaaggctaaaacatttaaaaaaatcggagtgatttcctttatatgataggatataaacgaagtgattcgggttatatgaaattttagaaagtcaaatcaatctgtagtaagagaaaacaggtcgaaggttgcctagagaaggaagtggatgtttggatgcattacagaaggacatgagggaactgtgtggggtgaagggtatgatggaaatgttcattgtcttcatttggtgatggtttcacagggcatatatataagtaatcaaattgtacactttaaatactcatcaaccattttatgtaatacatcttaataaagctataaaaactttttaaacttatggtaggtcttgagtttatggagtttatattaatatatttatcataagaaccagccacaaattgagggattggtaataaagagggaaaggaaactacatcaagcattctttgttgaaggctcatatgttccttttttgggctactatgcaaatttatattattacctatactatgcatatactactataaaggtaagaatattaggtaattaaggggaaggaacttctttctttccaagaatggttcattatatttgctttgttgctttgatctagttctaacctctcattgcaagctttgttgtgacgtttaccctctctcaatacagcttttggcgctaggagagctccacttggaatctcttcctttgtctagcatcaatgcataagacacatatcaaaattgtatttcatcccacatatcaactagaggaaaggtgaatgcataacactgaaagtcacggaactgttttattcgtttttttttttttatacagtggttctcaaagtgctgttatctatccaaatcagctgtgaaacttttaaaaaatatagactcctgggctctaacccagacccactaaatcagagattctggggacatagcgtggactcttcatttttttttaagttttataagtaattcttcaattatttgatcattgcaacaaatatgcattgagtgcttataactgagtgttaagcacaaggactaggtattaatttagaagtacaaaaaacatgtcatcatttgccctcaaattatacatatctaatatcttttgagagaaatagatacttctaaaagcacacaaaattaaaaagcacaaattgcaaccacaaacaattattgatatgaaaggaaaaggaaagggcctgactagaaattatcatagggtggggcagagggaagtagtttagattccaaatccctgagagggtcagggaaggcatcagactagattgggtgcgttcagggtggtatggccatagacaggccagggaaggcttcgataagaaggtggtattttagcaaacacctggaggaagaattgaagtcatagccaagataaaagtgcatcacacaaaaggaatgtcatagacaggggaaaaatgtgtgtcttcaggaaactgaaaaaggggaaagggccaccacaccttggtgaggggacccagtggtaagagatgaagcaggaaacatagacaagggcatctttgtacaaagccaaaagttggttcttttaagtctaataaaattgacctctggcctcaatctacccaattaattagtggaaggtgtgggaaggaacagaaatgaaaacaaaacaaacaagatatttccaaaactagagtaagatgctattctttttcaacagatatatcttcttgattacatactgtttgactctgtgatttttgttgctttaaattaaatctacaaggccttaaggggcctagctgagtctactatataatatgaaatatctatgagaaaatacgtcttctttatggtaaagtatagctttagttgttgagctttgttcactctttgtgctcaagattgacgtggcgacagacttccaacattggtggctgctactgagggccaaagaggagatgtgtactcccactgaatctgagtgtccactgagtgtgaaggtggatggtaaaatgcatgagtgtatcttacactcatactttacaagaaagtatgataaatgaggatgggagagaagctacaacacaggcacttactgattaactaaaatttgaagctgtgaattgcagcttcccctttagtgaaagatgatataaatagcttagttttcttcaaactagcagagactttttaaatggatggatgctgattttttttttaaaaaaagagcccatttctaaggcatgttttaaagcaggtgtcctcaacccctggggcataaaccggtactgtccggtggcctgttaggaactgagcagaacagtaggaggtgagcggccaagcattactgcctgagctccacctcctgtcagatcactggcagcattagattctcataggagcagaaaccctattgtgaactgtgcatacgagggatctaggttgcatgttccctatgagaatctaatgcctgatgatctgagtggaacagttccatctcaaaaccatttccctgcaccctccattcacggaaaaattgtcttccacaaaacgagtctcaggtgccaaaaagattggggaccaaagttctaaaggaatcaatctctttgctattattgttattattattgttaagatggagtcttgctctgtcacccaggctggagtgcagtggcacagtcttggctcactgcaacctctgcctcctgggttcaaatgattctcctgcctcagtctcccaagtagcttggactacaggcacatgccaccatgctctgctaattttttgtatttttagtagagacggggtttcaccatgttggccaaactggtctcgaactcctgacctccagtgacccacccaccttggtctcccaaagtgctggaattacagacatgagccaccacacccagctcccttggctattagtgaagtcttctttttcttttttgatcacatctatgcagtatatttgagagaaagaggaagtagagtgggaatttcagcagggcatggtggctcacacctgtaatcccaggactttgggaggcagaggtgggcagatcacctgaggtcaggagtttgagcctggccaacacggtgaaaccttgtttctactaaaaattcaaaaattagccggatgtgatggcaggcgcctgtaatcccatctactcaggaggctgaggcagggagaattgcttgaacctgtgaggcagaggatcgcaccactgcactccagcctgggtgacagagggagactctgtcacaaaaaaaaaaaaaaaaaaaaaaaagtatggtaatttctccattaacttcgatgctgctgtggtcttgatccccagatcaatgcaatgtcccggaatggcttccatttgccaggcctaccaacctaactgatgactttgagtttcccattgggacatatctgaactatgaatgccgccctggttattccggaagaccgttttctatcatctgcctaaaaaactcagtctggacaagtgctaaggacaagtgcaaacgtaagtaactctggagtgggaacccctctgttagtcaaacatctgtaagatctgattcaatttgttcaaattttgtaactgagttgcatacaacaattagtttgctaaggtgcaatacatatgagaattattcttgtagatcataccttgttactgctttgagttcctggcaccttcattacaagtttatttcatgagaaaccgtcattgcaggacatgattgagggaaaacccccattcactgggggtctcccactttcatgactaaaattaagtaatgaatgacttgggacaagaaagagaagtggattaaataactaaaagatgcgacaatcttgggctttgagatctttggattatatcagttgaattgaattacagataataacgaagtttacatttttctgggaggcataatatggggatgaaacagatctgaaaggaaagttttttttgaaagggagctgatcctgaggcagtctggtgagtttcctcaaggtagcaaaatctgtggaaccatcagaactgcatgtgttcctcagtaagctataggcaggttgagaccttatgtactaaaaaaaaattcagtttactctacttggcttcaaatttctgtttctttcctgtaggtaaatcatgtcgtaatcctccagatcctgtgaatggcatggcacatgtgatcaaagacatccagttcggatcccaaattaaatattcttgtcctaaagggtgagttggcatctcttgaaccaacatctcttggttcaagggttctaacacagccatactaccttctagtcacatctcagaaaggacaactaaactattaccatctgctctttaaagacttcaacacaggtgcttagctcctgactgaaatggacaaaggtatgacaagatcagggggaaaatcatctgtatccttgctggaaaccaaggcagagcatatatgaaaagtgtggcattcattgggtgggaaggaagaaaatgggggaagagtatagtcaaagcacacaatcagccttaacacagattagacattgctcaaagaaagggaaggccattgagcagctgtgtgagagaaatcttaatggtcatagcacaaatagtttgctagggctgctgtaacagagtactccaaaacaggcggcttaatacaaacaaagtttttggagttctgttccggaggctggaagtacaaaatcaagatattggcagagccagagccagatccatagccatgctccctccaaaacctgtagggatggatccttctttgcttcttccagtttctgaagccccaggccttggcgtgtggcagcagaactccagtttctgtctctgtctgtcctcacatggctgtcttccctctgggtctctgtcctcctatgctgttctcttatctgtgcatgtctgtgtccaaagttctttttttttttttttgagatggagtctggctctgttgcccaggctggagtgcagtggcgagatctcggctcactgcaagctccacctcccgggttcctgccattctcctgcctcagcctcttgagtaggctgggacaacaggtgcccaccaccatttttttttttttttttttttttgtatttttagtagagacaggatttcaccatgttagccaggatggtctcgatctcctgatctcatgatccgcccacctcacggcctcccaaagtgctgggattacaggcatgagccaccgcgcccagcccaaaattctctctttcaataaggacaccagtcatattggattgcggcccacactaacaacttcatcttaacttgattgcctctgcaaagaccgtatttccaaataaggtcacattaataggaactggggattaagacatccatatatttcaggggtgaggggaacataattctcatgcattgctggtaggaatgcaaaatggcaccatgactttgaaagacattttggcagttttgtataaaaataaacatactcttaacatattatccagcagttatcctccttggtatttatctaaaggaattgaaatctcaggttcacacacaaaaaaatctgcacacagatgtttataacagctttattcataattgccaaaacttggaagcaatcaagatgtcctttagcaagggaatggataaactgtggtacatgcatacaatagaatattattcaataccaaaaagaaatgagctatcaagccatgaagagacatagaggaaccttaaataatgaatcttctttcactattactaagtgaaagaagccaatctgaaaagcctatatagtatatgattccaactatacaccattctggaaaaggcaaaactatagagatgtaaaaagatcagcagttgccaggggttagggaagaaggggatgaataggcagagcacagaggattttgagggtagtgaaactactctgtatgatgccataacagtaggtacatgtcataataaatttatccaaagtcatatgatgtacaataccaagagtggaccctaagataaactatggacttggggtgaccatgatgtgtcagcgtaggttcatcagttgcaaaaaatatttaccaccctggtgaaagatgtttataataggggaggctatccatgtataggggcagggagtatataggaaatctctgtatcttctgttcattattgctgtgaaccaaaaacttgtgctaaaacacaaagtctatttttttttaaactacataaaagtaaatacacaggcacatgtgcataaacagacacgcacacagtcgagtacaggtaaaacaggaaatttgaacaaaactggtggatcatacctgtctcaatatcttgagtttgatgttgcactattgttttgcaaaatgttattattaggggaaaattgagtaaagtgtacctgggatctttctgtgctattccctacaactgcatgggaatctgattatctcaaaataaaatttttttttttttaagttactactaaatttccaaggggatgggcttcctaccaaagaattgtatattgtgaaattaaatcattcgaacttaaaacaattcaaacttatagctgggagaactttaaattattctgagccatgagaagactgtggctatgcagcctgagtcatgcagcaggcagctgtaacttctgcctttttatcctgtgaatagttaaaaccaaatggcgccagagataagacccactcagatcactacgccttttcagggagcaataatcttccttggaatgtagcaatatgtaaccaatcaaagtgatgtaactatgcatggtcccatatggaaaatataatcctgctaaaatttctctgtctctgcctatgtaagtgataccttacgtcctccactttggaatgctgaccccattcatttggagttggtgtcttccaggtggctacccttaagctgtgtgctcaaataaactctatccttaaatatattttctgaatctcattatttaaggttaacaatgtgctaacctaaacaattcacaggatttgttttttattctcattttttcctaacccaaccacctggttcaaggcacatagattaagaaggaaaatggaaatgggactaatatcccaggcttcactgtccctcttcgggccctggggaggagactcccaaaagtctagacatgttcacccacatcctgtatgtggtttctggaaacgaaatgatcatggcatttcctgaaccatggcttaactttgtgaatccacaactctctcttccccaggagatccaaaaagatagggtaggatgtaaaggcttcaatctgtttaaatggatatgagagtccctggctctccttaaaataagtagcatggattttgtctctctgccttacttcctcacaaacattctgaatgagaaaagttcaaaccattatttgttcaagtacttaatctactttgggacacaagtttaataaattaaaatattcttctatctgttccctttgatcagtgaacataaagttatcctttgactcatatttaaaatgttcagtactacaacactgaacaatagtatggaggaaaaaaaatgccaatttaagtttgaacttgcttcaccattcctatcccaacccccatgattagaaaatcaaaaagaacactttgagaaataacctcagtggggtcaaaagccagagtctccaggatgtcttgttcttaagacaaatagaaggaggtacaaatataggattgcagacttgtttacttcatttgttctctatttgtgtgcatgtgtgttggcagtgcaattgagaatgctttcatttttggtggtgtactagaaggcattaaaaaacaaaatgagaagtgggaattgaacaatgtgaatacatggacacagggaggggagcatcacactccggggcctgttggtgggtggggggctaggggcgggatagcactaggagaaatacctaatgtaggtgaccggttgacgggtgcagcaaaccgccatggcacatgtatacctatgtaacaaaactgcacattctgcacatgtaccccagaacttaaagtataataaaaattaattaattgattaattaattttaaaaaacaaaatgagtccaggcgcagtggctcatgcgtgtaatcccagcactttgggaggctgaggtgggagaatcacctgaggtcaggaattcaagaccaccctagtcaacatgatgaaaccccgtctttactaaaaatacaaaaattagccaggcatagtggcgtgcacctgtaatcccagctacttgagaggctgaggcaggagaatcacttgaatctgggaggtggaggttgcagtgacattgcactccagcctgggcgacaagagtgaaactctatctcaaaaataataataataataaataaccaaaatgatatcgaagtcactaataattacaacataatagctactataatgtaacaatgtgtcaagtgtctgcagaaggacccactgttgtctcactattcatttgatctccatttggcactgtttcgttgtttgaataaagctttatgctgccaggttttcctacatatttgtaaaacaaagttctcagccattccaataaccatgactgttacttgacattgcttcattcatgtatagtactatcaagtttgagcctaccctcactatgactagtttggcccaaccatctatcacaacagagggtctcaggtgaagtaaaataaatgttataaattcttccaaatttatggcacactttgaacagtttgagacatactaattgagaattgctaactttaacattttaagtataaaataagtgttcagttctttttggtcagcttggattgcctttggttctagttataaatcattttctttctttctttctttctttctttctttttttctttctttttctttctttctttctttttctttctttccttccttccttccttccctccttccttccttctttctttctttctctttctttctttctctctttctctttctctctctctctccctctgactctctctctctctctaccccgcccctttctttcctactgacaaggtcttgctttattgcccagactggagtgcagtggcatgatcaacactcactgcagcctcaatctcccaggctcaagcgatcttcctgcctcagccttctgagtagctaggactacaggaatgtgccaccatgcgtggctttttaataaaatttttgttgagacagggtctcactatgttgcccaggcttctctcgaactcctgagctcaagcagtcctcctacctcagcctccaaacgtgctgggattacaggcgtgagccactgtgaatggcctactttgatgaatcttactgataaaagcccatccatgcatccatatattaatacttataaggcatagaaatacatacaacaggactgcatacacacatacatatgtatatatatgacagcttccctgcactcaagaagcttgtgttgtcttttaaaaaaatgaaatttataggaaaaactgtaactcatctttgatttatataaaaatgtgtcataagataataaaaaagagaaatcccatccaactgagaaggcatggaagagaaaatgacaaagtcccaagaatgtgaaatttgggaaggtgatagacaattctttgacaagtggaaaatgtccctctgaattctataagagtgtaatctctggaagtagtaatctaattgggtagttgacctgtgtatttagaatgtaacattccttattttttgcctctagataccgactcattggttcctcgtctgccacatgcatcatctcaggcaacactgtcatttgggataataaaacacctgtttgtgacagtgagttgaaatatgcattcctatttcttttaccgatacattctaatttttctctggaataataaaaatcttaaccgaattccttctgtgcaatctgtacttcacatggctgaagacagccataatgttctcagatattcctatggggttcctggcaactctttctttaagttctttcttatcctgggatgtgtcttttctaattctaggggcctaaatacgtaaaaggcttcaaacttgattttacttcaataaacttgaaattatgttggttctaccacctccagtataataatcatcctgcttggcaaatcagtaaagattttaaaaattgatactcttcaaggttagcgaagctgtggaagaacctggactctcatgtaccacgagatcaacacatcctcttgaaaggccccatgcactataaacctcagaagtgggcatgtattttaacctacttcttagaatttatacttaggaaataatcacacactttttaaagcagtttggtataaacttttcattgcagcattatttatattagttaaaatgttagagtaacctaaatattttaaactatggtttggaaataatctactagtaggaaaaagatgtgttcaaatgaccattacaaagaattccctaagaaacatgaaatagctatgcagaatgaaaataagtatatccatacactggcatggtattcagccataaaaaatgatagcataaagaagcacttaatgactagaaagagatgtgttttatgtggaaaaagaatcagatgaacggcatatatggcaagatctcattttattaaaaaaaaatacacctatgtagtgagggccaggctgaggctgagagaaatgcagtgtataacatctttgtcttactcttctctttggataacttggggacttctttacttttcttcttggtatttaaaaatgttgttacttttactagaaagtttacgagcttcagaatctaaatttacaaatgacattggtcacacatttattgctgtttatccactttaagaaacagttttgctattttgtaaaacaaattgggaaaccttccatcttatttgaaatctgtaataagataacatggaattggaataggaattttcttggaaatattaaaaaaaattagtaaaatagaaaaaacaaacaatataataatacacctatacctatatctatatttttatctctgtttctacttctgtaaactctctatacccaaatcctggtaaatggctgtaagtcttcttggagaagactaggggaagatttacaatacatgcttttgactgcgtagcatggtgcttcctcaagagaatccagtctcccatccgttggtgctgctctgggtctataaactattcaagtctaggaattgttgatgaacaatgaacttcttttgcaataattcaagtcagacttcaattcacttgacctaaatctcttatgcttatacaaatcaaataacaccttagtcggctatccctctacttcggttttagagactccatgatcaattagcccaataacaatgttctcttcagtcaaatcattctgattgctgtttcagttctaatagccattacaattgtctctggcaattaagtgctgccaattggactctgtcaccctgagctcctttggtccccaagtgaattcagagaacccagttcaatggcaacagttcccactgtcattcctggcctacagagaatgagccatcgcagaggatgctgaaactccccgtgtgaatgtttttctcaagcctccagtaaaaggtctgtcttctgaaccctccactcctgcatgtgcctcaccagctctatccaaggatgtgactttcagagtggaatggctgttgcttaacctctgcctctcaaatatcaggctaatttctcatgctgtaaccctagtccagaaccatacagagaaactaagtctggaaaacttaattccaaattggcctggttgacactgtacaaaaccaccagataattataattttatttaactctttgtcttcttttctttccttccctccttcccttctgcctgcctgcttgccttccttctttgcttgcttccttcctttctccctcccttcctccctcctttccttccttcctccctccctccctcccttcctccctcccttccttccttccttccttccttccttccttccttccttccttccctccttccctccttccctcctttccttctccttattttctttcttctttaccacacggctaggaccaccagtataacattgaacattggtagcaatagatgtcatccttgtcttgttccacatctcaaagggaaggattaaaacatttcaccattaacctggtgtttacagtaggctttttgtaggtaaccatttttgaattaaggacattctcatacactcttcattattaaaaattttttgtctttgaaacatgttgaagtttatcgagcactttagttatatgtatcgatgtaatcatatctgtttctcttttttctgttaatgtaacaaactgttttgagtacatttttgaaaggcaaataattttgaatttcaattttacattcttaaaatcaactaagtcaatacttaatcatttttatatataacaaatacccttttataatacattttatatgtttctattaaagtataattcatgtatcataaaagttaccttttcaaattacacaattcagtggtatttagtatattcataaagttgtatattacggtctgaatgtttgagtccaccccaaatccatatgttgaaatctttacccctaaggtgatgacattagggagtgaggcctttggaaggtgatgagatcatgagagcagagctgtcacgaatgggattagcgtcctaataaaagaggcccagaagagctcctttgcccctcctgccatgggaagaaatgctgaatctgccagagaggttggtcctgaactccttagcctccacaactatgagaaataaatttttgttgtgtatgagctaaccagtttatagtattttgttataacagcccaaatagactaagacattgggcaaccagcaccgccaattaattccggaacactttcatcatcccattcctgttttagagattagactgtaattttctttcttgtaatgtcctcataagattttgatatcaaacttatgacagtcttataaagccagctggtagtgtttcatatatttgcttccttgtaagagtttatataaaattggtattatttcttctttaaatgtttaaaagaattcactggaaaagccatatagcctggagtttactttgttgggaggtctttttttattccaacaattttcttgtaccatgtagactttttgctgaagtataacatatatatgtagtaaagtgcacacatcttaattatgcagttcagtagatatttacaaattaaatgcacccatgtaagtggcactcagattaagatatagaacattatcagcaccccagaagccttcctgatgccctttcccagttatcttcccaaagtaaccgctattctgatttataacactaatagttttgctgcttcctaaattttataaaggaatcaaaaaataggtactcttctgtgtccggcttctgctcagtgttatatttggaagtcacttttgttgctgcatgaaggatggtcagtttttttattattatattgtatttcactgatgatcttgagtaccttttcatatgtttgtgaagggcctattccaaacttttgtctgttatttactggtttgtctatgattttattgttttgtagaagttgtttaaatattctcttgttttctaataaatgtaacacaaatgttgtctttcaggctgtggcttttctttttctttttcccttcttaatgatgtcttctgttgtagtaagttctacattttaataatattcaatttatgggtctttttttccagttactgctttttctattctacttaggcaattgggccaggtgaggtggctcacgtctataatcctagcactttgggaggccaaggcaggaggattgcttgaagccaggagttcgagaccagcctgggcaacaaagcgagaccctgtctctacaaaaaataaaataaaattagctgggctcagtggcacatgcctgtaagtcccagctacttgggagcctgaggtgggaggatcccttgagcacaggggttcaaggcttcagtgggttatgatggtaccactgcactccagtccaggtgacagagtgagaccctgtttcttatggataggcaattgatctaatatcatttattaaatgttgcaccatggccataagtcaggtgacctatatgtggatgtcattccagggaggttctgttccactggtttatttgccatacattgtgtttttgtttggtttagttttttgccatactataatggcaaaaaaaactgtagcattacattaagattttaattactatagcatgacattaatatttgatatctggtggcatatatcttctaactatgtgcatcttcaagatttacttggtgattcttggcactttgcattaccatataaaatttagaatcagcttgtcaatttccacaaaaagaatcctacttgaatttgtattgagtttctattgacttagtacatcaatttgtagacattaacaaatttagttttgaagtttaaatttatgaacatgatatatcctcccatttttgaagtcttctttaatttcttttaaaaatatttgttaatttaccttatagaagtcatgtacatctttcattatctttattactacatattatttttaaaattttattctctatttacttcttagatatgcactggtttcacctcagctccagcaattttattaaatttacttttaaattgaatagtttttctgtatatcttttgaagttgctgcataattatgtcatctatgaatctgacaaagtttttaaatcttttcctttcttatgtcttttgtttatttcatctgctttattgcattggctagaacctccagtacaacattgaatagaagagatgatacaagccttttaatggttatcacaaatcatgatgtatgctgtagatttttgtatgatatcctttattagattaaggaaactcccctttacttctgattgctaaaagatttatcatgaatgttcattctaattgatcactctgcatgtattgagattatcatgtttctttttcactctgttaatgtaatatattacattgattgatctttaaagggcaaacaaactctgaattcctagaatcaacctatgttgcttgtgatgtgttatagatgattatcctatctatgaaatgtgtgtgagtgtgtgtgtggtgtgtgtgtgcaggattgctcatatttttattgtaacgttgtaacattgatttaatatttaaaatcagtcaaggtaaacctcactttgatcattgtatcatcctttggaaatattgctggattcagtttcataatattttgtttagaaaatttgcatttatgttctcaagagatctttggttataatttggttttattttaatgtccttatcaggtttgggcatcaagattatgttgggctagtaaaatgtgttaaaaattgtttatttttttctagtctccggaataatttgtgtaacattaatattatttttccttatatgtttggaagaattcagcaatgaagcaatctggacctgagggtttgttgttgttgttgttaggttttaaattagtgattcaatttctttaatagctataaaagtattattttatatcgtattgaattagtttgggtaagttatatttttcaaggaatttactcattttatttaaattttctaggttattagcataatgctatttattatatcctcagaaatcctttggatgtctgtaaattctgtagtggtactcctatgctaattaatttctgatattggtaatatctttttgcttctttttccttaattagttttactggggctttatcaagtttactaagcttttcatataaactacttttaactttcttgttttttctttaaagtgtgactattttctcttttactgatttctgcttattttcttctactttctttaagctttgtgtactcctccactcctaaattcttgatattgattagataatttgttttcaacctttatttttctaatatatacatttaacctatacatttttctctaaaactattttacttcccacaatctttatatttttattatcattgtacataaaagttttctaatttaccttttgatgtcttctttgacccataggctatttagaagggcattgcttaatttctaaatatttggagatcttctagttatcattctttcattaattcaatcatttgagacatggtttatggcccagaatatggatgattttggtaaaatgttacatatgcacttgaaaagactgtacagttattttgtttcattttctagaaatgtcatttaggaaaatgtggtttagaacagactttttttctccctccacttgttctctcagttatggagaagcatgtgtaaaatatctgtattagtttcccagggctgctgtaacaaattaccacaaacttggtggcttcaaagaagagaaatttactctctcaacagtttggaggccagaaatccagttaagatgtcaataggattggttccatctgcaagctgttctgtgcctctcttcaggcttccttccagtggctgctggcaatcgttgatgttccttggcttgtagatgcatcatttcgttttccgcctccatcttcaagtcgccttctcctctgtgtgtgtcctttgctcttctggctcctgtaaagacactggacatggatttagaagccaccctggcaatccagaatggtctcaactcaagatcattaatttgattgtatctacaaagactctccaaactgggtcacattcacaggtttcagagattaggttaggacacagatattttttaaggaggacagtggttattcaacccattacaatccccaactatgactatgaatttgcctgtctttcctctttgttctagcaatctttaagcaatctttactttatgtattttaaacatgttattaaatgcatgtttaaataattgcatttgttaaattttttgtttattctttctgctgaattgactgttttatcataatgaaatgtctctctttacctctcataatacttcttgccttaaaatctactttgtacattaatatagctatatcagctttctttcttgtatttatattatatatatttcaaatcttttactttcagcccttctttgtcttatatttaaagcttgtctgttataaacatcatatggtaaagttttgttgttttattcagtctttctttgttgttcattagtgtttgaaacatttaaatttaataataaaaagttaaaattataaataaataaatttaatctagttactgataagtctaactcttggttatttgttttctatttgtttcatgtgtttgtgcctttattcctcatttctcacatttttgaattcatcaagtatttttattattctattttccccagtagcttttaagttatatttcattttttattcttaaatcactactctagagacagacatccttgatttactatagtctactaaaattgtgcttttaccagtctccaaacaacgcaagtacccaaactattaatatttaattccatttgtgtcctcctcctctttttgtattgttgccatacgttttgtaaaaagaaaagcttcagctgaattaaatttaaaagagtttaattgagcaatgaacgattcgcaaatcaggcagccttccaagccaaagtaagctcagagactcctgcccagctgcgtggtggaagaggatttacggacagaaaaaggaaactgacgtacagaaaacagaagtgaggtacagaaacagcccgattggttatagctcagcgtttggcttatttgaagacagttcaaacagttagccacatttgattggccaaaactcggtgattggcataagagtaacctacggtctgtttacatcttcactcgttataattcgcagtttacagagaaacctttaggctgagcttaaactatgtaaggctttaggctaaacttgatttaacaatttacatatgttatatatttcaaagacgtaattgttgttgttgtctttataaaaataatatctatttatatttacaccgtagtgaattcttagaatttttatgttgcctcagcatccatttagaatatgtttagctttctcatgccagaagcagggcttagtcacccttaatgccctttctagttctgtacctcctcccaattttgcaacgtggtcgagccagatatctgctttatacaactgcctcctggtgaccacctctccatgggacagctagataaaacctacttgactagcgtccctgccctctgtgccctgcatggacttcgcagttatgctgccgtgaccacctctcagtcgcagcatgactgcctggaacatgtgcctgctttctttaaactcaccaattagaactccccatgggagataccttggcttgtagatgcaagatgctgggtcatactctggtccccaataaaggcattggccgatggatccccttctctctctctctctacgttcctcgcactgaccaacctctttgtgatcttcaggcgtgccatacccccagcccgtaataaaatctttactgccatcttgtgtttcttgtaatgactgaagaggttttctctatcataaagatcctaaatgaaaacatacccgcatatgagctctttctggtgtgtttccttcttattgcaattctatcaatcctatatgaaactattttccttcagcctgaaaaagtctctttggcatttttgtattgtagatcttctgacaacaaattctttaaacatttttctaattgtggttcctttgaaggttattgtctatgtttcctgctgcttttatggattacactttaaaatagattttttacaatattactatgttgtgtctaggtaagtatttctttgtattgcttgggtttatcttgttgcacaactggagtgcagtggcgcgatctcggctgactgcaatctccacctcccagattcaaggaatcttcccacctcagccacctcggtagctgggattacaggcctgtgccactattcctggctaatttttgtatttttagtagagacagggtttcaacatgttggccaggctggtctcaaacccctgacctcaggtgatctgcccacctgggccacccaaagtgctaagattacaggcatgagccaccacgccaggcctgtatagctttttgaatctgtaatcttgcatcagtcttggaaatttctcagttattacttcttcaaatgttgtttatgtctattatctcctctcatggcaggacttcacttaaacatgctaggctttattcttctatatcttggtctgtatgtttaacatgcatttaaggagtttttgtggactaatatatgaccacttttacacagatatcatgttattatatcaaacttagatttgagtaaatgagttgataagttttatacctcttgtgtgttgtgaaatattgaaattacatttggaagcatctgttacttgaaagttcaatagagcttatctttttttttttattcttacatgtttgttgggtaattctagctttctaaatctttttgaatgaatattggcaatttatatttccatttatatcatttagattttcaaaatatttaacccccagtagtctacagttttataaatattctcatattcataaaaatgtttaaattccttttcctactgtgtatatttgtgtcttctctcttcccttatactttatcttttggcaaaggtttttatattttatttttctaaaaaggctaacctcagttattaacaaaaatgcaaattaagaaagcaaatgaaaagagtaggagaacactgtataaactctataatactataatcaaagggctatttaaaatgaaaagaatgtggatggagttaataaatgcatgcaaatattataggaaatcatataagtaagaaaggcaggacacatcatattatccccaccaaaattacaactttgtaaaaatgtacctacgtgttagcaaagaataaaagcaaataatgaatgtaaaaatagttacagtttagtgactcgtgagatttttgtcattcattatttaaattgactgtgctcttcctttcccaggaattatttgtgggctaccccccaccatcgccaatggagatttcactagcatcagcagagagtattttcactatggatcagtggtgacctaccactgcaatcttggaagcagagggaaaaaggtgtttgagcttgtgggtgagccctccatatactgcaccagcaaagatgatcaagtgggcatctggagtggcccagcccctcagtgcattatacctaacaaatgcacgcctccaaatgtggaaaatggaatattggtatctgacaacagaagcttattttccttaaatgaagttgtggagtttaggtgtcagcctggctttggcatgaaagggccctcccatgtgaagtgccaggccctgaacaaatgggagccagagttaccaagctgctccaggggtgagtctgactgaggcctagaagggccctgccagtgacatgcattgctgttggatcaggagattagtatttgttcagggggagggatttgtgctgagcagggtcgagaagcaaattttctaggtagtgaacatgaaattcagaaggtgtgtgtacatgcagatgtgctgaaatgaagaagcaaagctaaacctggacaaggaacgtgatgtttctttggagttcttataagcaaatctattaattacctttgagtataataactgctgatagaaaatgagtgattcttccagccaggcaccataatacaggctacatgtgaattttaatccttaaaacaaagttattaggtagttaccagtttttctaggtttgtctgttttgttttgcttgagacagggtcttgatctgtcactcaagttggactgcagaggtgagatcatggcttactgcaaccgccacctccctggctcaagcaattctcctgcctgagcctcccaagcagctgggactacaggtgcatgctaccacacctggttaaattttttatattttttttatagagatcgaatctcaccatgtttcccaggcttgtctcgaacacctgagctgaagcaatccacccacctgggcctcccaaagtgctgagattataggcatgagccactgtgcctggcctctatgttttgcagagaaaatgtgccttagagaaatcggataactttctaagatattaacttgcagactgaagactgaaacgcaagtccacccgactccagagacttggctttgctagtcagcatccagtcaggaaatcaaaacttactctagatactttcaaggagggagggatttcatgcaggctgtattagactcttctcacattgtataaagaactacctgagactgggtaatttataaagaaaagaggtttaattaactctcagttctgcaggctatacaggaggaatgactgaagactcctcaggaaacttacaatcatggtggaaggcaaagaggaagcatgtatattttcatatggctggcaggagacagcaactagggaggtgctacacattttaaacaagcagatctcaagagaactatatcacaatacagcactagggtgatggtgataaaccattagaaaccacccccatgatccagtcacttcccactaggctcctcctccaacactgggaattacaatttgacatgagatttgggtggggacacagagacaaaccatatcacagctaataggtcacaaagatgttagaagggcaggaaaatcaggcagcctccctagcaataggacgaaggcagagttaccagagatcagggagctgctgtggctcccagtctacacagcacaggagcctggagggatgctcaagtggccagcccctcccactgagcaggcagctccctgaaagctgctaatgctgcaggagccaccacagctgccagaatgcagctgatattgctggagccaaagtcattggcatcgctagaattgaagctgtagctgctcactgaagtcatctatactgccactgcctgagccacctctagaagtagaacagactctgccatcatcctgctttttaatttggtatatatgcctccaactggaagaacctaaccagagcccagctatcaaggaagacaaatgattatagttttaaggtttccattgctagcagccaaaagacagtgcagaagtgtgaggctaggggccaacagaaatttaaccagcacagcacctcaatattacatcaccaggcattgattagtcaagggaaacactgggtgatgagccctgaaaatggacattacagcatcagagtatttacaaactccctaaagaagtcatttttctagtccaatcccccatttgatgcttgagaaagctgaagtccagaaaagggaactgatctgctcaaagacaaactgaaattattttttccattttataacagttttatataatttagttgagacctaaatgtgttctgacttcctgagttccgatcaactatattaagagagagccagcgctgcccttacaatatgttgtgtgaaatagacactctcattatggtgacagtaggtcttttagattttgttcgacagttgcccaccttctcactggagtgaaatgaatgactaggcagcaccttgctgcatagcatgaagggaggagacccatagttctttaccaccctatgtcaggtggccgctgagagaagacttgaaaggagaagagaatagatgtatgtttgttgcaccagtgtgataggtgatggagggacctattagatgagacatgggcaggggcactcctttatggcctaaaatgcaagactaaattggtgatgcctttctagaaaggaagcatggagatataaaaatccatcatccctcccaattttgtactgggtgaacagtaattggaagcattctagaaggaactgtccattgtgaaatcttagttgcatactttagatgtaaaacaatgaattggggatacctctgttttagtcacagttgtgcaatgtgtcagttctatgagtgatggcaagacatcttcctcgccctgtgtatttagtttgttatcaatgtaataaggctgttattctaccttttttgttacatatagatttgtaattattattcccttggccagtttaacagtgagagaaaagttattttcacacaattagcagtactttgtttctctctccccagtatgtcagccacctccagatgtcctgcatgctgagcgtacccaaagggacaaggacaacttttcacccgggcaggaagtgttctacagctgtgagcccggctacgacctcagaggatctacgtatttgcactgcacaccccagggagactggagccctgcagcccccagatgtgaaggtgactagactcttatctggcttggtatttttagcttgcgtctttattctccacatgccagttatttctgttcgtttttctttttttccagtgaaatcctgtgatgacttcctgggccaacttcctaatggccatgtgctatttccacttaatctccagcttggagcaaaagtggattttgtttgtgatgaagggtgagtatgagcttgcctgacctgctggacattgaaattggggttaggaattagtccaaaaaggggagatttgatgtggcttaaaaaaagacagacagacagacacacacacacacacacacaatcagagagatgaacttttgaaagtatatataggaagaaaggaaagacacatatggaactaataacatgagatatgaagaggacactgggccatatattaactggcaaattcaaagacaagtataattacttgttattaatatataggtaacacagtaagtttaaaaaatcctattttcaaaattttagaatttcaaaacagcaaatagaatatgagtaatttaagagtctcagaaaaaattgcaagtaacaaaaaacttattctaaagagctaggatcatttaagaatcatttcagtaaattctttaaaccatcagtaatgaaatttgtaataggactgaaagtgtaaaaatcagcattttaaaaaaatccagtcatatatcgtctggctagtcatgggctctgggctctgagctggggttctgatggctgctgttaatatttccagcaaggtcattaccttgtttatgtccacctagtgctcttcgcagggtgcacatctctacacgggagctgaccagcatgggcaacaaagcacctgatcccaaaatgtaacacagaatcttggcaggctccaaaagccagcacccagtaagagttaggagggcatcggggcccaacagacattgagaattttcaacaattgcgtacaaaaattatgtcctctcttctttcctttttcccctagaatattcgtgcttactcttcagcagcccaaattgcccttttgagccttcttcacgccatcacagatgtggagatgaaaggacaatctctgttctctcgccagctatttcccactttaccactccaaactgggagctgttttacttgctgttccagggtcagagttacgaaggcattgcattagaagactgggtttctaataatgacaatgagtaatcagtgaaactccaagcctgggtcctgggtcaaggagatggtggctattttgtgaccacctttttcaattcaagcaggactatcatgtgaccaagctactgcattttgccactctatattgctcccttctggaggctgtgatttttccagaataacgtagcctgtgcaactctgccacctgctggcctcaggtcctcaaaatcctgaaattggggctgggccttagattgtgaactaagtgtcctcttggctgaaacagctcgctattcactcctattttcttctttagatttcaattaaaaggcagctctgctagttactgtgttttggctggaatggaaagcctttggaatagcagtgttccagtgtgtgaacgtaagtaataggagtaacatttcaggccaatctctcctcttcatctgttcagtatttgacccatgacctcccctaatgtggttcttcaattttctaatctgaattattgatttgaaaatttcttattttagtaatgtttggttgtgaatcaatgtgtacatcacctgtctttggaactatctgatctgtctctgtcattttgtattctatgttctattgcgataaatcctatggtcgtgtgcttctaggtcaggagagattagataatgtgaagcttttacaatttgctttctttctctacttcttttctttcttctcttctttccttccttcagttcttttttcccttcttctctccctctctccttccttctttttcattttgttctccaatcaatgtgcagtcagtctacaatttgtgtatatatttgataatactcaagtatcaaacatgcctttatttaatcaattatttattgatcacatactttgtgcctctgttcatctagatactggagttatagcaatgaacaagatgagtgaagtccctgtccccatgttgtttttactcaggtggggagaaggacaaggaaaaaaataagcaaattaaatgctacggataatagatcaaagcaatgaagaatgagggaaaagtggggagtaacattagacagggtgagcagtttgagactccataaattctcaaaatatgtacctaaataatttatgctgagagattcataaataataagtcatttttttaaaatgagcctcatatgttcaataatcagtagactactgatttctcctagtctacccatttataatttccccaatagaagatagaactttgcttcatttcttgattctaatgattggaaaacatgtttctttagaaaaccatgaaattttactaaaatgtttatgttcttagaaatgtacttggacatcttacagtgctttttagagtaaaattttggaagaacataacttatatagagatgcttgctgtctaagaaatccagtgctccttgaggcagcatgacaaatgtctgttctactatcatgcatgaaagctcattgattggactactcaagctttctcttatttttcataactctggtagttaaaataacttcttccaaatgccagttctaatgaaaaatgccaattagaaatgaggaagagactattataaacaaatcagtagatgctagaaaggagtaacaacttgaaacctgacccagaaagtaaaaaaagaaaataaatcatcaacagaccttgacattttcaaaagcaaagcaatctgaatccatttggagttttttataatggcctgaatatgtttcaattcactgtggcagggctattgttatcactgagactgatgatcaatatcagtaagtaatcagtgaaagttttcacctatttaagatgattagcacacatatatacatttgagaaatatttcccaagaacgtaggccccttcctcagcactgtgtccccaggatcctgatgagtggctgacacaggataagtgctaaattaagaaagattgactaaatgaatgagtaacccttcaaaacggttatttttcttcttcaaatgttttgctacttcattaaagttgtaaagtaagtaaacttgcattggatctttcccatgtctgcaaaagcttcttattgaattttttcaattgtgggataagagaaaccttttttcaaaagcgttcagataggtggatgtaagagtttttcttgcaggtcgtctttgattattgcttgaaatgctcacttcatgagaatgtttcaaggaatatttgtagagaaaatcttcattccttatgggaaaataaataataaatgactctatatcaggaaataaagattgtgtaggaagacaaattctgtttgaataactaggtgggaagaaatcctttgaaaactttattggtagtaaataatgccataaatgacctttacattttgataagggatgcaaggtctctacacagatctaaatctagatctagatagatctggagggaaggtctttttgaaagtggggcttagtaggtggctgatcctgaggctctctgatgagttttctcaaggtgccaaaatctgtggaactatcagaactgcgtgttttcttcaggaagctacatgcaggttgagaccttacgtactgaagagagttcagattactctacctggctccaaaacattttctttcccacaggtaaatcatgtgaaactcctccagttccagtgaatggcatggtgcatgtgatcacagacatccatgttggatccagaatcaactattcttgtactacagggtgagttggcagcaacatctcttggttccagagttccagcacagcaatactaccttctagccacatctcaggaaggaaactaggctgttgccacctgctcttgagaggtttgaacacaggtattaactcctgattgaaatgaacaaagataggagaagattaggggaaaaatctgtgtccttgctggaaaccagggcagtgcacacataaagagtatgccgttcactggatgggaaggaaaaaaaattaggagtatagtagtcaaagcacacaaacaaccctaacccagagtagacattgctggaagaaagggaagggcatgtagcagctgtgtgagagaacaaatcttaatgataacagcatgatcgcttgctagggctgccatcaaaaagtacaggccttcctcattttattgtacttcacagatgttatgctttttacaaattgaaggcttgtggcaacgctgcaacaagcatgtcagttggcatcatttatccaacagtgtgtgttgacttcgtgtctctgtgtagcattttggttattctcacaatatcccagatgttttcattattatcatgtctgtgatagtgatctgtcttcagtgatctttgatgttactattttcattgtttggagtccctacgaactgcacccatataagacagaaaacttaataaatgtgcatgctttgactgctccatggacaagacattccccttctctctccctctcttcaggactccctaatccctgaacacaataatactaaaatgaggccaattaatagccctacaatggcctttaagtgttgacatgaagggaggagtcatgcatctcttactttaaatcaaaagctggagatgattaagcttagtgaggaagatatgttgaaagccaagacaggccaaaagtcaggcctcatgtgccaaacagctagcgagttgcaaaggcaaagcaaaagtacttgaaggaaacttaaagtgctattccagtgaacacatgaatgataagaaggtgaaacagccttattgctgatatggaagaagttttagtggtctagatacaagatcaaactagacatatttccttaagctaaagcctaatcctgagcaaggccctaactctcttcaattctgtgaaggctgacagaggtgaggaagctgcagaaaaaaagctggaagcagctgggcactgtggctcatgcctgtaattccagcactttgggaggcagaggcaggtggatcacctgaggtcaggtgttcaagaccagcctgaccaatatggtgaaacctcatatctactgaaaatgcaaaaattaaccaggcgttgtggcgggttgcctgtagttccagctactcgggagtctgaggcatgagaataacttgaacccgggaagcagaagttgccgagattgtgccactgcactccaggttgggtgattcctgaggtttaaggaaagaagtcatctccataacataaaggtgcaaggtgaagcaacaagtgctgacatagaagctgcagcaagttgtcctgatgatctaactaagatcattgatgaaggtgttaaaataaatagcagattctccatgtagacaaaacagccatctattggaccttcatagctagagaggagaagccaatgcctgggttcaaagcttcaaaggataggctgcctttttaggagctaatctcgttggtgagtttgagttgaagccaatgctcactgaccattctaaaagccctagggcccttaagaattatgctaaatgtaccttgcctgtgtctataaatggaacaacaaagtctgatgacagaggtatgtttgcagcatggtttactgaatattttaggctcactgttgagatatagtgctcagaaaaacagattcctttcaaaatgttacatacagctcattgactttgtatccaatcaggcaagagctctgatggagatggacaaggagatgcatgtagttttcctgcctgctgacaacagcagccattctgcagcccatggctgagcagtaattttgactttgaagttttagtatttaagaaatatattttgtgccaggcatggtgtaatcccagcatattgggagaccaaggtgggcggatcatgaggtcaggatttcaagaccagcctggccaacatagtgaaaccccgtctctattaaaaatacaaaaattggccagcatggcagaatgtgcctgtagtcccaactactcaggaggctgaggcaggagaatcacctgaacccaggaggtgaaagttccagtgagccgagattgcgtcaccgcactccaggttgggcaatagagggagacttcaactcaaaaaaaagaaaaagaaaagaaaaggaaaaaaaaatacattttgtaaggctatagttcccacagacagtaattcctctgatggatctgaacaaagtaagttgaaaactgcaggaaagaattaatcattctacatactgttaagaacactcatgattcatgggaagaggttaaaatatcaacattaacaggagtttggtagaagttgattccgaccctcatggatgactttgagaggttcaagacttcagcggaggaaataattgcagatgtgacagaagtagcaagaacactacaattagaagcagagcctaaaggtgtgactgtattgctacaatatcatgatcaaacttgaacagaagaggagttacttcttatggatgagcagagaaagtagatttttgaggtggagtctcttcctggtgaagatgccatgagcattgttaaaatgaccacaaatttagaatattacataaactaagttgataaagcagcagcagtatctgggaggattgactccaattttgaaagcagttcagagggtaaaatgttatcaaacagcattgcatgctacagcaaaatcttttgtgaaaggaagagtcaatgtggccagttttattgttgtcttagattaagaaatagccacagccaccccagctttcagcaaccaccaccctgatcagtcagcagccatcaaccttgaggcaagaccctccaccagcaaaaagattgtgacttattgaaggtcagataatctttagcattttttaccaataaaccattttttaaagtatgacctttttttcacataattctatttcacacttaatagactatagtatattacaaacacaacttttagactcactgaaaaatcaaaaaattcatatgacttggtttgttgtgatatttgttttattgtggtgttctggaactgaacctgcaatatctttgaggaatgtctgtaacacaaaatgggtggcttaatacaacagaagtttttggagttctgttctatagactggaagtccaaaatcaaggtgttgggaagaccatgctccctctgaatcctgtagggtaggatccttcattgcgtcttccagcttctggagccccaggccttccttggagtgtggcagcagaactccaatttcttctgttgctgtcctcagatggccatcttccctctgggtctgtgtcctcatatgctgttctcctctctgttcatgtctgtgtccaaagttttctctttttataaggacaccgggcatattggattagggcctaccttaatgacctcagcttaactggattgcatctgcaaagattgtatttccaaataaggtcacatccacagggactgggggttaagacttcccaacatatttgggggagacacaattcaacctataacagagtccctttgaaaatgtcaagtgtcaggtgctcacagcgcatggtccagctgttggtgctcacccttgctcagcacacagtggaggctctgcctcaatctcactcttcacgggaacagctaagccaggtagtgagtaggggctatgtttgtgccaccgcaacaaacacagaaaggaagcttgtggtgtccagcatatttgccagcctaggcttcagagaccatagcacctagaatctgacaaaataaaattggaataaatccaaagtcctcttttcttttttgagcatttttaaaaatacaattgataaatttcctaactgttccttcctcatcttgcattgtggaataagtgcgaacctccctgcggcatgaggcagaaaaccattgagcttatgacaaaaaacaggaaatacatgtaaaagagaccaattttaaaaaatcaggagaaattttacaaaagagatttactgccaggaaaccaggaaaactttcagaacactctccttttcctatttttaacaagactcagttgtacaaataattctgtgaaactagccatgaagtttgcacacgaatgaatatatgtagtcagtgtgtttatatatttcatttcatatatgtgtcatatatatgtgtgtgtgtatgtatatatatatatatatatatatatatatataaaacactgaatattgcagaaaattaaagcaaagagtaagaagagttaaccaaattttccctcaatgcagtgggaaaagatgaaaaggagaagataggtgggcacagtggctcacacctgtaatcccaacactgagaggccgaagcaagagaatcacttgaccccaggacctcgagaccagcctgggcaataaggcaaaaccccatctctacaaaaaagtataaaaattagctgggcgtggtggcgtgtgcctgtagtcacagctacacaggagactgaggtgaaaggatcacctcagcccgagaggctgaggcttcagtgagccgtgatggcacccctgcactccagcctggatgacagaatgacaccttgtctaaaaaaaaagaaaaagagaagacgtatgtaagacagtgtcaggattcaaattatgtattaaaaaaattccagaagggtaagcaaataagcccatacctagccatcactagggaaatttctgtgtttcagggatagagaaaaaaactcagattccagaaataaaatgtgaaaatgtaatacccgcaaaagaaataaatttattgacaccacattgattctacacaacactaaattgtagaagatagcacttctgttgagccaagctaatattcacatctagaggctccagatacacattaaagaataagcaaagacacaaaaattgtaccatttaagtatgtttcccaggcaattaataagcaaatttttaaaaaggagaatgatgaattcctaaagaaatctcaatgagatagaaaagtggtaaaaacaaacaacaacaacaaaaaaccataaacacaaaaactggcaatgtaatcataatttagtaataatctctgtgaagtcatagaatatatcaatagaagtagaaaatgtgagaaagcaggaaaaggtaggctagacttacagaaaagatgagtagactgactgtacagaatttgactctgaaattgagaaaataggtttaaatatatgtatcaagtgtatatatctacaatatacatgcacacatataaaattaaattcctaattggaaaaaatattaagtttaatttccaaattattagaataactaaaacagctgaatctatctgttccatatagtaaggggagggaaggaaaaagaatagcaaggaatgcatttgtctctgtcatcggaaataagccccatcatgtttgggtcaggtcattttattcattgctttctcctcatcctcatcatgggacatcgtgaaatcatgaaaaaggtagtgaaagaattatgacaaggccgagcacagtggctcacgcctgtagtcccagcactttgggaggccgaggtgggagggtcacctcagatcaggagttcaagaccagtctggccaaagtggtgaaacaccatctctactaaaaatacaaaaattagctgggcatgttggtgcatgcctgtaatcccagccactcaggaggatgagtcaggagaattgcttgaactcgggaggcagaggttgcagtgagcagatattgcaccattgcactccagcctgagcgacagagccagactccgtctaaaaaaacaaacaaacaaacaaagcaaatcaaatatataatttatttcaatccatttggtttaaacttcttgtcaaaaaaccaagtctactagacaggatcaaaagcaacaaatcttgtatttataaaaaacatgcctcaagttaaatggcatagtattacacacacacacacacacacacacacacacacacacatattaagggaatacgcaaacaaaaaatggcagaaataatatgggaaaagacagaacttaagaaagaaattgtcaagcaggtctacaaaatgattgttttattttggtgccaggtacagtccacaatgaagtcaagatattaagaagtaaagtggaccaggagaagttagagcagaaatatctcttttcaatagtgagagcagaaaaagaagtagaaaagctgggaacaataggtaaagtttaggctaggccttagacttctcctatattgtaatccctctggtttgccacatatgcatgctgtcaggaagttgatgaggtatgtacagcacaattattttccattttttgcctttaggcaccgactcattggtcactcatctgctgaatgtatcctctcgggcaatactgcccattggagcatgaagccaccaatttgtcaacgtgagttgaaatctctttccccattcaccccaccatttaaccctagagttgtcctcctagaattacaaagaatgaatctcatccctcttggaaatggtatccttctgatatttgaagaatccagtcatatccttaaaatggctcacagcattccaaacttccaccttcacctagaaatgctttttttcttatcttaaggtgtaatttattttaaactagtcttgagctaatttaaatagcccccaatttcatcctctgttgggtgaacacctcccagtttgaagagcattttctttggtgaagtcaacaaatacaaagtcagtgaaagaaaccgcatatcctctctgcaagctgttagtatcacatcagatattcaagccatgcagctctttcttccttcttattctttgtctaaacaggatcatgccatcttccctgtgagttgtttggaagatgagctttctacattttggggagcaaagaggaatgagcaattgcaagctaataaggaatataaaatgtgtataatcctgggtttagtgatggtgtgaggaaatcagcaatttcaaacccatctggtgggagaataagtgggaacaaactttgtagaagggcaatatactggctgggcactgccctacagtagagtaggacacagtattcagttcttccaagatcagatgaaattgggtgcattcagggtggtatggctgtagatcagtatccagttatttgtattacttctgaatctgtaagtatcatgtttattatatgtaatattgtatatttgtgcttgctttgtctttattagttctgccagagcttttgttcttattatttaataaagatgttatactgggccaggtgtggtggctcacacctgtaatcccagcactttgggagtcctaggtgagcagatcgcttgagcccaggaggtcgagaccagcctgtacaacatggtgaaaccctgtctctacaaaaaatacaaaaattaaatgggcatactggcacacgcctgtagtcccaactattcgggagactgagaggtgggaggattgcttgagccagagaggtcaaggctgcaatgagccatgatcgtgccactgcactccagcctgggcagcagagcaagaccttgtctcaaaaaaaatgctatgctgtatgctttattatattaatatccaatagaataaagacacatgccttctatatagagagaactaaattaataatggtgagataacatagttaaattctcatttagcaggagaaatataaatgtgtactataggccaggcacagtggctcacacctgtaattccagtacattgggaggcccaaggtaggtggatcacttgaggtcaggagttcaagaccagcctggccaacatggtgctaccccatctctactagaaatacagaagttagctgagcatggtcgtgcatgtctgtaatcccagctacttgggaggctgcagcaggagaatcatttgaggccaggaaaggaaggttgcagtgagccaagatcatgatactgcactccagcctgggcaacagagactctgtctcaaaaaaaaaaaaaaaggaaaaaaatgctctataataatatatggacacatttagcaaagtaatgttaactacgaagagcacaactcacaatattataaaattgtaagaatatatctgtacattagtaaatattagatgagaatgatattgtgaatatttacttccggtaatttgggatttcagaaaagctattagcataatttacaataaagtataattttaagaaaccatgccgggcacgatggctcacgcctgtaatctcagcatttggaaggcagaggcaggtggattgcttgaggccaggagttcaagaccagcatggccaacatgaccaaaccccaactccaccagaaatacaaaaataaaccagatacggtggtgcgtgcctgtaatcccagctactcgggaggttgaggggggaggattgcttgacctgggaagttgagattgcagtgagccatgatcgtgccactgcactccagcctgggcgacagagcaagactctgtcccaaggttttgttttggtgaacttgcggtctcttttcccaggaattccttgtgggctaccccccaacatcaccaatggatatttcattagcaccgacagagagtattttcactatggatcagtggtgacctaccactgcaatcttggaagcagagggagaaaggtgtttgagctcgtgggtgagccctccatatactgcaccagcaaagatgatcaagtgggcgtctggagcggcccagtccctcagtgcattatacctaacaaatgcacacctccaaatgtggaaaatggaatattggtgtctgacaacagaagcttattttccttaaatgaagttgtggagtttaggtgtcagcctggctttgtcatgaaaggaccccccgcaccgtgtgcaatgccaggccctgaacaaatgggagacagagctaccaagctgctccaggggtgtgtttgcctgaggcctagaagggccctgcaagtgacatgcattgctgttggatcaggagatgagtatttgtttagggggagggatgtatgttgaggagggtgggaaagtaagttttgggggaagaagcatgaaattaagaatctggggtgtgcatgcacccatgcatatgtgtcttcattttgaaaagcaagaccttaattagccaagaaaactggtattttggactcacctattaatcaattgtcagggcaaagtaccagctgcaatctctctcaattatattgaaaaattatatggactttatggtcagctgtgccctaagcactttgtatacattatctcatttattatttaaaacaacactgtcttatttaagggcttgtgtttttgatggctcatcttgtctactgatgccacaatagctggcttagcagcggagtgggaggtgttatggcagatacatagggacagagaaagagcttacaattcttctaccaacccatgttagccttgtgcaaccactgagctgggaagacaaacagataaagggatataaagacggatgtaccgaggcaggagatgggcagggcttgtgttctggtcacaatcctgctgaccaaaacagaatctggcctagacaggatgaagtgaaaaaacagcagcaacaggcagatggcgatgaaagcaatcactagctgccctcatattcccatcagcactgtgacagtttacaaatgccatggcaacgatctggaagttaccacccctttccaggaaagttctaaataacacgcccctcaatttgcattgatgtgccccttaacttacctgtaattggctgggcatggtggcccatgcctgtaatcccagcactttgggaggccaagatgggcagatcacctgaggtcaggagttcaagaccagcctggccaacatggtgaaaccctgtctttactaaaaatacaaaaattatctgagtgaggtggctcgcacctgaaatctcatgaggctgaggcaggagaatcacttgaacctgggacgcggaggttgcagtgagctaagatcacacgactgtgctccagcctggatgacagagtgagatatcacctcaaaaaaaaaaaaacacaaaaaacaagaaacaaaaataatttacatgtaattgaagcgggcttacaggagtataaatacagttgcctgccaggagctcatatgttgctgactctgggcacattgcctgtgagttagccctgctctgcaaagggcaatgcctttctaaaagatcgctgtctagcaccactggctcatccgtgaattctgtcctgagtgaggcaagaacccttccagaataagccccaatttaggggcatgcctgtccccaaacagtatgactgtactttagtcattggtgtgcaatcagagaaatatggggaaatctgtaaaacagacttggtctcaggtgacagtctcattacctgaataatgatggtacaaatacctccctaggaaatatgtagatggagaatccaccaatactaataactccacactggatatccagagctaggagaaaatacttcatgccctgtagatttacaggtgaattttgggccatgtgctagggagaattgtgttctatttctctaccttttactaactatgaggccttcagcaggcataggatatagcaaaagaaattcccccataactaacaagtactctggaactgtcctttctacaatgtgtcagccgcctccagaaatcctgcatggtgagcataccctaagccatcaggacaactttttacctgggcaggaagtgttctacagctgtgagcccagctatgacctcagaggggctgcgtctctgcactgcatgccccagggagactggacccctgaagcccccagatgtacaggtgcctctctttccccctcacatggaagtcttactcctgttgttttattttttcttctcgtgaaatcctgtgatgacttcctgggccaactccctcatggctgtgtgctgtttccacttaatctccagcttggggctaaggtatcctttgtttgtgatgaagggtgagtgtgacccagtgttgagaccaaggactcagtgtggagaatcactgagttaatccaattaaggagctgacctagtagataagaagtacccagagagattaatttatggaagggtagttttgaaataagcgttaatccaattaaggagctgacctagtagataagaagtacccagagagattaatttatggaagggtagttttgaaataagggtagggactaagtggcaccgccttcagaaaacaatgaaaaaatggcacatacaactcaatgtcagatacaaacctaaatacagtcactgatcttgggtacacagttggaacttgaaatgaatgggtacgtatttatttggaggcaaaagaacataattttataaaatgtatgctagaaaaaaaagatgaatgagatggaaattgtttgcctcataataaggcaaaggttgttttaggaaacttaaaaccagtcaataatggaatctgtaatagtgtatgaataactatgttttaacccaattacatatcttcatgtcaagaatggccagtgtaattgttttgatgcaagatttttctcagccactttgccagctggtgacctctggccagaaacatccctgtccaggccttgctctacccaggatcaatgcaggagacacctcatctacttggcccacccaggccgtgccaggcttgtgctctgatgcagagcccatggctgccgcgactacatgctcagcctctgggagggggtgtgtgagtgagcaagtgggggttccagctggccgcgccaagcactggcacaggagcgggctccgtgcaaggcttgtggctggaccaggcatgtcacactgaagggaatgtgttggtgcccaaacaggggtccccacgaccccgaagcccagagggggtgtaacagcatggtaatagctcttagcatttgataatgcctgcagcccaacagatggcggtgtgttaacaactctgtcagttccatcgccctgctcaggcctgcatctccaaggctgacttggcctgcatctccaaggctgacttggcctgcatctccagggctgactggacctgctggtgcttcctgttgcatggaataacttccctcccctaggagacggcaaagagccactgtattacagccttcttcatacctgcgtttggtgggtcctgagttcttgtcccgcatccaagaagaacaagcttatgctgacaatagaagggtgaggagggtggagaagagttttattgagtgacaaaacagcttctcagcagagaagagacacaagggtggaccccagatgaagtcagggggtcattctctcagtgtggctggttctggagcctttatggactcagaattggaagtgtgtgttaattggttggtgagtatgcaaaaaaggctaaaacaaagccaccactcaaaggtgggcacaacagtgcaaaaaaccaattagggaagagcaggtatatgtgaaatagatgaagagtggggatcaatcagaggaaagcacacccaacaggaagagaggttctcaagccagtccatggatttacctggaacttgtagctaggctttaaactgtcttcagcttgaaggtcgggtttcaccgggatccgccccatctgcctgtgatttgtctgcctcctgcttctaccactgtcaagtggtattattcgttgcttatgtgtatccattattcttggtgatacagtatgagtctgggggataactagattgagcaattaaggagttatttttaataatttccaaggattctttggcatttacaaagtccaccacctaataatgatttccaatttcagaacgattttagatttcagaagggaagcagtactcaatagtaagttgagcatttcagggtggcaaagactcctcccctgacccttctttttttcttagaacacatggttcagcatgcttctgtgagcctctttctggcctgttacatttggagtggcgagaagaacagatattcctggctttgcttaccaaatcaaaagctgttctgcctcatgacccactaatgagaataagtgggatgtcagagagccatcaatgaaagatgacacctgaaggttatggctcttgtgcccatggagaagtctggttctgtgttcatgccttctgtaggtgatgctgggctatgaagtttatatggcacttcagctctgattgctttgccagtcacagggtaccatggttctttagaataaattggcctttgagtttctgtcagctactgaagaattcagatccctaatgaactaagacttttagctagacctgaacctaagacccaaatgatagtcaaggaggaaatggtagtgaggaagctgagcatctattagtgaagaaatcaagggagagatgggaattgctcacacatttgctaccacttttttttttctttaggttctgattaaaaggcaggtctgctagtcattgtgtcttggctggaatgaaagccctttggaatagcagtgttccagtgtgtgaacgtgagtagaaagaactatgtagtttggatagctctccttatttttgttttccagtgttttactgcacggaatcacttgtctggatctttacttaactaaattactgattaaaatacttctctgttggaagaatttcaagaagggtcttgtaggacttttctgacatttgttactaatctgtaaatcacttagtttaatgactgtttaattttgtggggaatgtgtggcaagaaactaaatgacataaaagtgcagcacattttagtcagtcatttatttttaattttcttataaggagtaatctttcttacattttttttttcttttttgagacagttacccaggacagaatgcagtggtgcaatcacagctcactgcagtttcaatggcctgggctgtagtgaccctcccacttcagcctcccagtagttgggactacaggtgcatgccaccacacctggctaattttttatattttgtagagatggagtcttgccatattgcccaggctggtctcaaactcctgggctcaagctatcctcccaccttggcctccaaaagtgttaggattacaagtgtgagccaccgtacccagccaaatttttatgttcttttatcccctcacttatcataaacaatttagtcagcttgttttttagcctgcagtattgaatgacatagggcttcccatgtgctaggactttccatgtgtagaaaatgcaatgaagagtaaaagaatagtgaagccacctccctactttcctggagtatattttcttgttgggaagaagactaaaaacaataaaataagaaaacaaaattctaaaaattataatatataaaatggtagttaaatagggatgttatggagaaaataaaacagagttatatgataaattagtacagtggaaggagccgggatgacgaatcagtgtctgaaatgatgaggtgtcctaaatttccaaaccatccgcttaaataaaatatcccaaaattcagaaagaattcagaaactcagataaaagtacatatttgacatactaagacattactgatttaccctattctgtctattaaagcaaggcatgatttttttaaaccttttttttcttattggaaaatgtttactttaatttgcattgtgttaaaataacttacagaaatcaatttggatattttatggtgagtattatggtgaagaacattcaatacctgaggaaactcaagtatccaacaaactcaacccttacagagacacatagagctgaaaataaatatataaataaacttaggaaaaacacaagtaaaattcaagcatgagaagttaatcattgtttgatgtactaagtcttttatgtacacataattccgataaacttgggtatctcttcctaaattcatatcaaattagaagcatcaagtgcttttagggaaggaactgttctaaacagaagaaaagaaggaagaaatgatggctaataatttggaagaaagaaaaaaagcctctttggcaccatttaatctgtgtaaaaagagccttaccaatgtagtctgatgacaccactggaaatttggtattggtcctgatgataacagtcttgaatcaccaagaaacatttacattgctaaagatgatagttcatgactattaaagttcatagatttccttggaacttatggtctctgatggccaaaattttgtctgtcttgaacctcattgtcaactcaggaatcttactatgcctgatttaaagtagacaaccaaatgggtgtttgtaaaaaaattaaaaaaaattactttccaaattcattatgaacatagctacctggatggtccaaaaacactgtctttgggcttttgcaatagactgtaatttaggtctcacaacagttagttgcctctcaacaaaagccttacagatttaaattccatccaccttagttatagtctttctaaaagaaaaaaaattatattcatagcactgtcgcaggtcactaatatttcagtcatcttaagtgaaactctaatagaacttaaaagctcttgttttctttctagaaatcttttgtccaaatcctccagctatccttaatgggagacacacaggaactccccttggagatattccctatggaaaagaagtatcttacacatgtgacccccacccagacagagggatgaccttcaacctcattggggagagcaccatccgccgcacaagtgaacctcatgggaatggggtttggagcagccctgcccctcgctgtgaacttcctgttggtgctggtcagtatccgcttccacatatcctaaatgggttcagaatatgtaggtgagaaccttcatatttctatagtgacagtcatttttgcttgtgaaaatggctttgctgtaactgtcagagacagaactacctcccaagtgaatgacaaatgggttctagataggcacactgtctcaattattggtattctgatggcctttggggtgaggagggtgggatggtaaggagagaagagggtggacagtgaagagaattggtgaggtccagattttgtagagaaatttttgaaagtactgaaaacaaatgctaaagaatgtactcttttattctacccctactatgagttgtctttatcctggagagatggatgtgctgcgcaaaaagtacatgatgatgtaatttacttcagaactgataacgctataaaagtaatttaagaaattcagatgtagggatttatactttttatgttgtttccaagggtttgttcaagccgctgactatatttagttggtccttcacctcaccattaacaaagggaactcgggaggccctggagaagcagagtctgagactgtactcttagccttcatagctccttcctttgatatattactctggctttaaacgacagtacttgacaaccgtagatgcatttgtggctgtgactgcccacacaagctccatcctccagtaaggacagaagagcattgaattataaaaggtgttgactttttaatgtgttcttttgagatggagtcttgcactgtctcccaggctggagtgtaatggcacaaactcggctcaatgcaacccccgcctcctgggtttgagcaattctcctgcctcagcttcccaagtagctaggattacaggcacccaccaccacacctggctaatttttgtattttttagtagagacagggattcacaatgttggcccggctggtctctaactcctgacctcaggtaatccatctgcctcgactttccaaagtggtgggattacaggcatgagcctggtgctgacttttttgacctgttggctaattggacttagaacttctgtatgttgaaaaaatgactataaatcatgctgctataaagacacatgcacacgtatgtttattgcggcattattcacaatagcaaagacttggaaccaacccaaatgtccaacaatgatagactggattaagaaaatgtggcacatatacaccatggaatactatgcagccataaaaaatgatgagttcatgtcctttgtagggacatggatgaaattggaaaacatcattctcagtaaactatcacaagaacaaaaaaccaaacaccgcatattctcactcataggtgggaattgaacaatgagatcacatggacacaggaaggggaatatcacactctggggactgtggtggggtcgggggaggggggagggatagcatcgggagatatacctaatgctagatgacacgttagtgggtgcagcgcaccagcatggcacatgtatacatatgtaactaacctgcacaatgtgcacatgtaccctaaaacttaaagtataatttaaaaaaaaaaacattaaaaaaaaaaaagaaaaataaataacacagtagatagatgagaaatatatgggaaacacagcaaagggttaatagtgttatcttacaggtagcagtagtggtggttgtggtactagttgtaaaagttaatatataatgaatacttagtaccactgttagataggctggacatggtggcttatgtctgtaataccagcactttgggaggctaaagtgagacgatcacttgagcccaggagttcaagtgcagcctgggcagtatagcaaaactctgtctctacaaaaaataaaaaaaattagctgggcgtggtagtgcatgcctgtagtcacagcttcttgagaggctcaggtgggagaatcccaagcctgggaggtcgaggctgcagtgagctgagatcacaacactgcaccccagcctggacaacaaacaagactctgtctcaaacacacacacacacacacgcacacacacaagatagcttctaatttaattacacaacaacctatgaggaggatagtattcttattgtctcattttataggtgtagaaactgagacacagagggtttaggtaacttgcacaagaccacagaatggggtagcctgggttcagccaagcaatctacttatctgtagagactgtgctctttaacaataaataaatggtcaacggacctaaatatataattcaacaagagagaatatttaagtactgtcataatgaaatggaaagctatcaggcaaggtcccaaacaccagataatgggcaattcttaagttggatgaaggagatacatacaaagaattagaatgggccaaataactattaaccagcaggttcttggaactcagagcttagtgtaaactcctcgtgaattgggctgaaccacataggaactccttttgtctctctgaactaagactcagactaaaagcagtcccctttgccttcttgttcctagtctctttaccctatctagtcttggcctttgacatcttactgctttgtagtgagaagagacaaagaaaatttcatgatcttagagactatcgaaacagaaaaaattaaacccagtattttttccctaagacttgggatagattgcttaagataccagtcctaggccttcctaaaatggaagatgaggaactaacctggggcggtggtccaggcttggagtgacatgccatagagggttttgagacagaatagcaatccaaagagaaaaaggaacctttgagtactagcatcagagcaggaagaatatcttgggatactcagatcccctatctccccatttcaatggcccagttacatcagaggcctgattcatttcaaaaccttcctcagagcaaggggtaattgccaggtaccctttaaagccagaattaatacatataacccatatttatgctgtctcaagactaattagcatggtgttgcatgctagacaaataagttcaactccagaaaacatgtaaaaactaacagaagtttcaacttgaatatcttaagagaggcttaaagaaaaattaaactatgtgacactcattaaaatgtccccaaatcctctttacccatttccattacccagtgtcccattcattaaagcaactgctttcctagagcctagcttctctcagttccacccagactgtctctcaatagtctccccaccttctggaccttcttagttcacaagaagtctccatgccatttctaaggtaaatggagtttcttcagttctgcatagttcgatgcaacacagccttgaaagtttctgcagggaaatgcggaaactatcttaggatgcaagatttagagaaagggtgtaaatatctttctactttggcacataaatatacagaaactgtttaacctcactagaactaaagaaatgcaaaaataacaaagtaccctttttttttattatactttaagttttaggatacatgtgcacattgtgcaggttagttacatatgtatacatgtgccatgctggtgtgctgcaaccactaactcgtcatctagcattaggtatatctcccaattctatccctcccccctccccccaccccaccacagtccccagagtgtgatattccccttccgtgtccatgtgatctcattgttcaattcccacctatgagtgagaatatgcggtgtttggtttttcgttcttgcgatagtttactgagaatgatgttttccaatttcatccatgtccctacaaaggacatgaactcatcattttttatggctgcatagtattccatggtgtatatgtgccacattttcttaatccagtctatcattgttggacatttgggttggttccaagtctttgctattgtgaataatgccacaataaacatacgtgtgcatgtgtctttatagcagcatgatttatagtcctttgggtatatacccagtaatgggatggctgggtcaaatggtatttccagttctagatcgctgaggaatcgccacactgacatccacaatggttgaactagtttacagtcccaccaacagtgtaaaagtgttcctatttctccacatcctctccagcacctgttgtttcctgactttttaatgattgccattctaactggtgtgagatggtatctcattgtggttttgatttgcatttctctgatggccagtgatgatgagcattttttcatgtgttttttggctgcataaatgtcttcttttgagaagtgtctgttcatgtccttcacccactttttgatggggttgtttgtttttttcttgtaaatttgtttgagttcattgtagattctggatattagccctttgtcagatgagtaggttgcgaaaattttctcccattttgtaggttgcctgttcactctgatggtagtttcttttgctgtgcagaagctctttagtttaattagatcccatttgtcaattttgtcttttgttgccgttgcttttggtgttttagacatgaagtccttgcctatgcctatgtcctgaatggtaatgcctaggttttcttctagggtttttatggttttaggtctaatgtttaagtctttaatccatcttgaattgatttttgtataaggtgtgaggaagggatccagtttcagctttctacatatggctagccagttttcccagcaccatttattaaatagggaatcctttccccattgcttgtttttgtcaggtttgtcaaagatcagatagttgtagatatgcggcgttatttctgagggctctgttctgttccattgatctatatctctgttttggtaccagtaccatgctgttttggttactgtagccttgtagtatagtttgaagtcaggtagtgtgataaagtaccctttttttaaattgtccattaaattaacgacaaacaggtttttatgtgaacacccaataaaaagtaaggatgtaatgtaacgaatattgttgtatattgaaggtactattgtaaattggcaaaatctcttatgaaaaacaattatgcaatgtgtgtggacaataatacaaatattctgccagttagcctcctagaactgcaacctaagaaaatagtgtaaaatataaaatagtttatgcattttattaagggtttcatgagaaagaaaactagaaataaatgcacaatagaagtcattgaatatactatgatgcatctactagattatattagtttgcctttgttgtaacttatatttctagtatataaatatgtgaaaacataccagaagagaatgtatcaaaacacattttgggtactaggatttggggtgatatttttctttagttctgtattataagttttcttctgtaattgtattacttttacgagaaaaatattaatttttaaagtcttcttggcagtggctcgcgcctgtattcccagcactttgggaggctgaggcgggcagatcacgaggtcaggagattgagaccatcctggccaacatggtgaaaccccgtctctactaaaaacacaaaaattagctgggtgtggtagcacgtgcctgttttcccagctacacaggaggctgaggcacgagaatcccttgaacccaggaggcagaggtcgcagtgaggttgcaccactgcactccagcctggcgacagagtgagactttgtcaaaaaaaaaaaaaaaaaatcttctctgagtgcagaaggtaaaatgagagtatatgagtgaaatcaatggctttttataaaaaatattagtctgagtcctgaataaaaatcaggataaattgtcactggctgagaagtcctgttcaatcatgttgcatgccagagtgatgtttttgtgacttttgtcttccttttaggttcacatgatgctcttatagttggtaagttttatgaagtgtttgctgaggaattctgtcatctttaacagtaagtacctacttataatgaatgcaatgtagaaagagagatcaaaatatcttgagttataaattcaaatagaaagaaaattatgatgagtttaggccaggatatggtgaaactggcatcgtcatatgccaggttattgagtaaccttcctcaaaagttctttactatctttgaaccactacaaatgcataatcgttcaacagtgtcaaaaagtatttatttgaatgtggtgggagaatgaaacttcttctttgggttataacctggagtatgcttccagatggtgattgtgcccatttgtacaaatagaaagctacaagaccagtcttccgagcccatgtctgtgatctgcctatgtaagaagaatagttttgtaatagagtttgcttccaagggaatctctatggcatagtattcttacatccctttttatacatctggacactgagacacggagggtttaggtaacttgcccaagaccacagaatggggtagcctgggtctaagcaggcaatctacctatcagtggagactgtgcactttaacaatcaataaatggacaaaaggacgtaaatatataattcaacaagagagaaaattccagtattgtcacagtgaaatgcctgtgtgttaagccttaggcgagagacatgggcagggccatggagagccagtggccagctgtcccatcgcacttctcacttacttgtggaaaggctgatggtggactaaaggttacaaaagaggtcagctcaccccttaactataataaccctgtgggagtgagactaatgctatagaaacccagagtaaagcagaatgtatagttacatcttttaaaaaaaaaagcattggcaatctgtagtgggactggatactaagatagaatttaaaacctgtgagttatattttccacgcatttaattaccttgttttactgcctaggcactttacttggtacgatcatctttattttaatcatcattttcctctattggataattttcaagcacagaaaaaggtaagtatagccatattatcccaagaaatgtaaactgtacttaccccctcttggaagtcaaaagaaagtaaaagacaaacaaacccattgctacataaacagatgtggtaattcttataaagaaggtccttgacacacagtatagacaaagaggtattcacactaaaggaagtatataggatactaagaacaattaaaaaataataataataacaaaaaaccagcattttggccaggtacagtgactcatgcctgtaaattcagcactttgggaggccaaggtgggcagattactagaggccaggagttcgagaccagcctgggcaacatggtaaaaccccgtctctactaaacatacaaaaaattagccgggcgaggtggcacacgcctgtaatgtcagctgcttgggaggctgaagcacaagaattgcttgaacccaggaggcagaggttgtagtaagctgagattgagctgttgcactccagcctgggcgacagagtgagactacatctcaaaacacacacacacacgcacacacacacaaacacatagcattttaagcaagaattgagttttacagaaagagaaagtaggcagaaggggtttttaaaaagttgttcatgaggctgtttgatatcctagttttgctaagacattgcagatactgacctctaagcccagatcctatcatagcactagaagttagattgggtcacttatggcacacataggctgccagtggggaagaactgagactttccattgggtattttaatatatgaacaaatattttgtaattacaattaactttttttttttttgagacagagtcttgctctgtcacccagcctagagtgcagtggtgcgatcttggctcaatgaaacctctgcctcccgggttcaagggattctcctgcctcagcctcccgagtagctgggactacaggcctgtgccactacgccaggttaatttttgtatttttagtagagacagttttgccatgttggccaggctggtctcaaactcctggcctcaagtgatccacccgccttggcctcccaaagtgctgggattgcaggcatgagccaccatgccaggctaccattaactttttacacttgaaaaaaaattccaaaaattaagatctgagtaaagaaatgtctttgacagggaagagaacatacgcagcttttgtactggttgactgaaatataacaacatcaatgaggccagaatcaataatatcaatgttataaggttgatgagcaaattctatatccataaaaaactgagggccaggctcggtggctcacgcctgtaatcccagcattttgggaagctgaggtgggcagatcatgaggtcagaagttcgagaccagcctggccaacacagtgaaacccccatctctactaaaaatacaaaaagttagctgggcatggtggcgtgtgcctgtagtcccagctactcgggaggctgaagcaggagaatcgcttgaacctagaaggcggaggttgtggtgagctgagatcgcaacactgcactccagtctgggcaacagagcagactctgtctaaaaaataaaaataaaaaaactgaatttgcaacttttaagtgaacagttttctacaggaaatattctaaacaagtacagtttcctacaatgagctttacagcaatcgaagttttcgtatttcacagagatttcaatacactttttaaaaagtagtttgtcatagtagatcttgctgtaaacaacctagtcaggaactcaatttcatgggaaaatagtgaattggttgacatttaaatttaaatcattatccttcctaactaatgttctctatatcgtatggcttgacatatagatgttctttgctcttttctattacaaaaagaaaagataagtagctgggcactttaccttaacaaagtacttgtgtcaatacatttttctcttaaagtttcttgttaggtaccactataatttgtgagttatttttattttttttttgagacgagtctcgctctgtcatccaggctggagtgcagtggtgcatctcggctcactgcaagctccgcctcccgggttcacgccattctcctgcctcagcctcccacacagctgggactacaggcgcccgccaccacacctggctaattttttgtatttttttagtagagacggggtttcaccgtgttagccaggatggtctgatctcctgaccttgtgatccacccgcctcggcctcccaaagtgctgggattacaggcgtgagccaccgtgcccagcctatgacttaattttttttttttaatttactaagtctgaattaaagaagttggggcttctaattttctgtatctataccagtctctagttgaaactacacaagggaaatgattatctcttccttttgaaaatattcaagatactttaatatgttgaagatatttgagtatctccacccttctaactatgtcattcttcattccttatggcacattccttgttaatcaactagagggtcagattcccaagcctaactattgatttgtttcacctacataatttaagatcatttcctcatattaatcatcttcaggcataaacatgactcaataaccatttcataaaattatttctttagaaatgattatcttgtatagtttaagcaacctcagagcatataccatttcttcacattttccatctcgtaaaacctgcctactttttcatattcttttaaagtgtaatgtccatggcacaaccattctctctctgaccagtggctaccagaaatgtggcagaaagaaagatcatgatcctcgttagacttaaaggtcagggaggtaaacctcccaaacatctatgtaacccacactaaaacctattctatatgtgtaatccaggaaaatttttaaacattttctaaacttttatttttgacctgtttcacttcttgggattgtaactgtctgacgtgttcttcctgcctgtcatacagacaaaaccaattccctgagatcatggtatattgcagtaaagaaagagatgaattaacacaaggccagtcacgtggaagaactggagttatcactcaactcagtctccccaagaacacaggggctagggtttttatagatcatttggtaggaagggagctagggaatgggtactactgattggttggggatgggggtgtgggaaatgttcctcatgtgctgtgtccacctctagttgggggccacaggaccagttgagtcatgagtcacaggtccaggtagagtcagtcagttgccaaatgcaaaaatctgaaaaacatctcagaagaccaatcttacattctacaatagtgatgttacctataggagcaattagggaagtcacaaatcttgtgacctctggccacctgactcctgagcagtaatgaattataagaactatgcctatattttagcagagttcaggtccctctcctaatcctaatcttttggcctttcattagctttcaggccctgagcaaggagggagctagttttaggaagagactgttattatccttgctccaaagttaaattataaactaaattcctttcatggttagcttggcctacacccaggaatgagcaaagccggcccacctgtgaggctggaagcaagatgaagtcagtcacgttagatttctttcactctcagaatctttgcaaaggtggtttcaggatagtgagtgcatttctctaacaaaacaccattgattttcatgttagaaataacatatagctaaaattggaaaaaagaagtaataaacttaaataatcagaaggcagaggtcccttcttttggaaggagttgggctaattaatcatgcagtcatacctccttgagtgggtgtggccaataagctaagtcattgtggctatgtgaggagggccaattattccttatctggagctcaagctttcctcacagaaagagaagggcataaagggcctcatggcaaagaagaaggaagtcatgtgggaaacacagaatatgagtggagagtatcgtagtggtcatcaagtaagaagagccgtttatcctggagctaaaaaagactgacagatatagaatagtgtagaacaagatggcctgctctatgggagagccacaatcacaccaggactagacagtagcaggctgatgtatatctcaaacactggagacaattcagaaactgcataaacagtctgaagacttactaagaaactaaaatgaggctgggcgcggtggctcaggcctgtaatccctgcatttagggaggcctaggcgggtggaccacctgaggtccggagttggagaccagcctggactacatgataaaaccccatctctactaaaaatacaaaaaattagccaggcatggtggcgggcacatgtaatcccagctcctcaggaggctgaggcaggagaatcacatgaaccagggaggcggggttgcagtgagccaagatcgtgccactgcattccagcctggacaacaaaagcaaaattccctctcaaaaaaaaaaaaaaaaaaaaaaaagaaagaaagaaagaaaaaagaaactaaaataagacagaaatagaagtaattcacacacagaaatcatctcaccttctttaaaatgctcctcaaggaggcctactttaacgatcctagtaaagatggtatgactcgtatgacccccacccccacattcccaatctttcttatcctgctttatttttttgtatacttatcgtttattataattaattaaataattaagtttcttgtttattgtctctctccctccatgaagtcggggatttttgtcctgtcttcaccaatggatacataacaaatctaaactgtccccggaacaaagagagtctcaataaatacttatcaaatgaatgagtgagctaaacactactaagagtgttaccacaaggggaaatttctgctctaattaattctctaccaagttaaacagtgcatctttaacttgtcctaagcttactccaggtttcaaggctgctccttgtactaatataccaactgtctcagtctgttggtatagatacttgggcagttataacagaaactccatagactgggtggattcaataagcatttaagctgggtgcagtggtactcacctatagtcccagctactcgggaggctgagggaggagtactgcttgagcccatgagtataaggccagcctgggcaatatggcaagaccccgtccctaaaaaacattatttcatttctaaaaaccaagcatttatttctcatagttctggtgggtagagcgtccaagatcaaggcaactgcaaattcagtgtgtggtgggactcactttctagttaatagacttcaatcttttctttgtgtcctcacctcagagaaaagcagtgagggagctcttgcgggtctcttttctaagggaactagtcccattcacaaggggtctttgagaagtaattagatactataaattttcaacatataaatttggaaggattcaaacattcagtccattgtacaaacactgaatttgataagcacatctgcttaaatgatatcacatgtgttgatttcatgtgcttttccacctttgtttctaaattccgttaacccatctctgaattcattcaaccaagactctctcccagacaactctagtccaaaataatgtctgtctttgaaactcacatttcctgactatactattttaaaaataaactgggaggagccaagatggccgaataggaacagctccagtctacagctcccagcgtgagcgacgcagaagacgggtgatttctgcatttccatctgaggtaccaggttcatcccactagggagtgccagacagtgggcgcaggtcagtgggtgcgcgcaccgtgcacgagccgaagcagggtgaggcattgcctcactcgggaagtgcaaggggtcagggagttccctttcctagtcaaagaaaggggtgacggatggcacctggaaagtcgagtcactcccacccgaatactgcgcttttccgacgggcttaaaaaacggcgcaccacgagattatatcccacacctggctcggagggtcctacgcccacggagtctcgctgattgctagcacagcagtctgagatcaaactgcaaggcggcagcaaggctgggggaggggcgcccgccattgcccaggcttgcttaggtaaacaaagcagccaggaagctcgaactgggtggagcccaccacagctcaaggaggcctgcatgcctctgtaggctccacttctgggggcagggcacagacaaacaaaaagacagcagtaacctctgcagacttaaatgtccctgtctgacagttttgaagagagcagtggttctcccagtacgcagctggacatctgagaaggggcagactgcctcctcaagtgggtgcctgacccctgacccccgagcagcctaactgggaggcaccccccaacaggggcacactgacacctcacactgcagggtactccaacagacctgcagctgagcgtcctgtctgttagaaggaaaactaacaaacagaaaggacatccacaccaaaaacccatctgtacatcaccatcatcaaagaccaaaagtagagaaaaccacaaagatggggaaaaaacagaacagaaaaactggaaactctaaaaagcagagcgcctctcctcctccaaaggaacgcagttcctcaccagcaatggaacaaagctggacagagaatgactttgacgagctgagagaagaaggcttcagacgatcaaattactctgagctacgggaggacattcaaaccaaaggcaaagaagttgaaaactttgaaaaaaatttagaagaatgtataactagagtaaccaatacagagaagtgcttaaaggagctgatggagctgaaaaccaaggctcgagaactacgtgaagaatgcagaagcctcaggagccgatgcgatctactggaagaaagggtatcagcaatggaagatgaaatgaatgaaatgaagcgagaagggaagtttagagaaaaaagaataaaaagaaacgaacaaagcctccaagaaatatgggactatgtgaaaagaccaaatctatgtctgattggtgtacctgaaagtgatggggagaatggaaccaagttggaaaacactctgcaggatattatccaggagaacatccccaacctagcaaggcaggccaacgttcagattcaggaaatacagagaacgccacaaagatactcctcgagaagagcaactccaagacacataattgtcagattcaccaaagttgaaatgaaggaaaaaatgttaagggcagccagagaaaaggtcgggttaccctcaaagggaagcccatcagactaacagcggatctctcggcagaaaccctacaagccaggagagagtgagggccaatattcaacattcttaaagaaaagaattttcaacccagaattgcatatccagccaaactaagcttcataagtgaaggagaaataaaatactttacagacaagcaaatgctgagagattttggcaccaccaggcctgccttaaaagagctcccgaaggaagcgctaaacatggaaaggaacaaccggtaccagccactgcaaaatcatgccaaaatgtaaagaccatcgagactaggaagaaactgcatcaactaacgagcaaaataaccagctaacatcataatgacaggatcaaattcacacataacaatattaactttaaatgtaaatggactaaatgctccaattaaaagacacagactggcaaattggataaagagtcaagacccatcagtgtgctgtattcaggaaacccatctcacatgcagagacacacataggctcaaaataaaaggatggaggaagatctaccaagcaaatggaaaacaaaaaaaggcaggggttgcaatcctagtctctgataaaacagactttaaaccaacaaagatcaaaagtgacaaagaaggccattacataatggtaaagggatcaattcaacaagaagagctaactatcctaaatatatatgcacccaacacaggagcacccagattcataaagcaagtcctgagtgacctacaaagagacttagactcccacacattaattatgggagactttaacaccccactgtcaacattagacagatcaacgagacagaaagtcaacaaggatacccaggaattgaactcagctctgcaccaagcagacctaatagacatctacagaactctccaccccaaatcaacagaatatacatttttttcagcaccacaccacacctattccaaaattgaccacatacttggaagtaaagctctcctcagcaaatgtaaaagaacagagattataacaaactatctctcagaccacagtgcaatcaaactagaactcaggattaagaatctcactcaaaaccactcaactacatggaaactgaacaacctgctcctgaatgactactgggtacataacgaaatgaaggcagaaataaagatgttctttgaaaccaacgagaacaaagacacaacataccagaatctctgggacgcattcaaagcagtgtgtagagggaaatttatagcactaaatgcccacaagagaaagcaggaaagatccaaaattgacaccctaacatcacaattaaaagaactagaaaagcaagagcaaacacattcaaaagctggcagaaggcaagaaataactaaaatcagagcagaactgaaggaaatagagacacaaaaaacccttcaaaaaattaatgaatccaggagctggttttttgaaaggatcaacaaaatagatagaccgctagcaagactaataaagaaaaaaagagaataatcaaatagatgcaataaaaaatgataaaggggatatcaccaccaatcccacagaaattcaaactaccatcagagaatactacaaacacctctatgcaaataaactagaaaatctagaagaaatggataaattcctcgacacatacaccctcccaagactaaaccaggaagaagttgaatctctgaatagaccaataacaggatctgaaattgtggcaataatcaatagcttaccaaccaaaaagagtccaggaccagacggattcatagccaaattctaccagaggtacaaggaagaactgataccattccttctgaaactattccaatcaatagaaaaagagggaatcctccctaactcattttatgaggccagcatcattctgataccaaagccgggcagagtcacaaccaaaaaagagaattttagaccaatatccttgatgaacattgatgcaaaagtcctcaataaaatactggcaaaacgaatccagcagcacatcaaaaagcttatccaccatgatcaagtgggcttcatccctgggatgcaaggctggttcaatatacgcaaatcaataaatgtaatccagcatataaacagagccaaagacaaaaaccacatgattatctcaatagatgcagaaaaggcctttgacaaaattcaacaacccttcatgctaaaaactctcaataaattaggtattgatgggacgtatttcaaaataataagagatatctatgacaaacccacagccaatatcatactgaatgggcaaaaactggaagcattccctgtgaaaactagcacaagacagggatgccctctctcaccactcctattcaacatagtgttggaagttctggccagggcaattaggcaggagagggaaataaagggtagttaattaggaaaagaggaagtcaaattgtccctgtttgaagatgacatgattgtatatctagaaaaccccattttctcagcccaaaatctccttaagctgataagcaacttcagcaaagtctcaggatacaaaatcaatgtacaaaaatcacaagcattcttatacaccaacaacagacaaacagagagccaaatcatgagtgaactcccattcacaattgcttcaaagagaataagatacctaggaatccaacttacaagggatgtgaaggacctcttcaaggagaactacaaaccactgctcaaggaaataaaggaggatacaaacaaatggaagaacattccatgctcatgggtaggaagaatcaatattgtgaaaatggccatactgcccaaggtaatttacagattcaatgccatccccatcaagctaccaatgcctttcttcacagaattggaaaaaactactttaaagttcatatggaaccaaaaaagagtccatatagccaagacaatcctaagcaaaaagaacaaagctggagacatcaagctacctgacttcaaactatactacaaggctacagtaaccaaaacagcatggtactgataccaaaacagagatatagatcaatggaacagaacagagccctcagaaataacgccgcatatctacaactatctgatctttgacaaacctgacaaaagcaatggggaaaggattccctatttaataaatggtgctgggaaaactggctagccatatgtagaaagctgaaactggatcccttcctcacaccttatacaaaaatcaattcaagatggattaaagacttaaacattagacctaaaaccataaaaaccctagaagaaaacctaggcattaccattcaggacataggcatgggcaaggacttcatgtctaaaacaccaaaagcaacggcaacaaaagacaaaattgacaaatgggatctaattaaactaaagagcttctgcacagcaaaagaaactaccatcagagtgaacaggcaacctacaaaatgggagaaaattttcgcaacctactcatctgacaaagggctaatatccagaatctacaatgaactcaaacaaatttacaagaaaaaaacaaacaaccccatcaaaaagtgggtgaaggacatgaacagacacttctcaaaagaagacatttatgcagccaaaaaacacatgaaaaaatgctcatcatcactggccatcagagaaatgcaaatcaaaaccacaatgagataccatctcacaccagttagaatggcaatcattaaaaagtcaggaaacaacaggtgtggagaggatgtggagaaataggaacacttttacactgttggtgggactgtaaactagttcaaccattgtggaagtcagtgtggcgattcctcagggatctagaactagaaataccatttgacccagccatcccattactaggtatatacccaaaggactataaatcatgctgctataaagacacatgcacacgtatgtttattgtggcattgttcacaatagcaaagacttggaaccaacccaaatgtccaacaatgatagactggattaagaaaatgtggcacatatacaccatggaatactatgcagccataaaaaatgatgagttcatgtcctttgtagggacatggatgaaattggaaaacatcattctcagtaaactatcgcaagaagaaaaaaccaaacaccgcatattctcactcataggtgggaatcgaacaatgagatcacatggacacaggaaggggaacatcacactctggggactgtggtggggtggggggaagggggagggatagcactgggagatatacctaatgctagatgacgagttagtggttgcagcgcaccagcatggcacatgtatacatatgtaactaacctgcacaatgtgcacatgtaccctaaaacttaaagtataataataaaagaaaaaaaacttaaaaaaaataaaaaaataaaaataaactaatttattttaagagtaatatctcatcattattaaaaataagaaataggggaaaatataaatgaatgtaaaaattacctgcaataatctctacctagtattattcttaagcttctttgcatattattttatatttgcatgtacactttgagattatattgattgttcaatattgaatcctgcttttttttcaccaaatgacaaacatttcacccatcatgataacagtatatatccacttgacatttcatgtgttttttttgttgcctgttaactgtattgcattcatttccttgcttatttactcttaaaatattcttagccacttacagtgtaccatacattgtgcttatgtgtgttttctttcccatattaaattaccttctgatgaggagacattttttcaaaaatatattctatatcagtttttactttctctagggagagaaattaattaaaaaaaaaactccccaaatctctgaatataatcaaatgagaaatattcagtaatcaactgagcatgttaaacagttgagaaatgaatttatgaaaatttcagttatcctcatctttttggaaatactcttttatatcaaagtacacttgaagttgtgtacactaactactgatcaccttttactaggtataaagtccttaaaaattttgtttcggccgggcgcggtggctcacgcctgtaatcccagcactctgggaggccgaggcgggcggatcacgaggtcaggagatcgagaccattccggctaaaacggtgaaaccccgtctctactaaaaatacaaaaaattagccgggcgtagtggcgggcgcctgtagtcccagctacttgggaggctgaggcaggagaatggcgtgaacccgggaggcggagcttgcagtgagccgagatcccgccactgcactccagcctaggcgacagagcgagactccgtctcaaaaaaaaaaaaaaaaaaaaaaaaaaaaaaaaaaaaaaaaaaaaaatttgtttcaactttcccttttaagattggaattttgaccacagtgttccatgggaacaaagtgaatcatctgtggcaaaatatgctagtcaagaagtgagttagaatctgtgccaagcgttaagaccttgtgcacccaggttctggggcagagtgaagaggcaggctccaaagacatagctgtgtgttggacatgagagtgtttggaggaatacaggtaacaggtgatgctgggaagtcttgtgaaatggaaggagaacgaagatgaggaatctggtggccgtaataaccggggaacagatgagctggagggcctcatcaggaggggtgtcccttggtggaaggacaccattcccggccttaaaaggagaggctccagcacggctggggaagcatgtggataccttgtaataaatccactgtcgtagctcattcttgattgtaattaaaagaggaggacatgctttctgaagctgactccctccaagatgaccagttcctatttctgtcccctgctacaactgtggtttagagcaagagactcaaaaaaatttcttctgttatgagtgacctgtacgttttctagaatggaatgaggctctttatttagtagctcaactctgagaacactttttctttggacaaaattaaaaaaggaaaaggtcaagttaatcattaatctctctcttatctactgatgtctccatttacgccatattttctatgtcctacatagcagtcatcacagagggcaataaacacttctaatgaccttgtaatttatatggaatgctagcatcatgattatcagcttgtaaattctgggtaattcaattgtggaccatgctgttaattaaatgaaaacatcctgttattttagggaccttccttgacaaagtactatacagctgaagaacatctcgaatacaattttggttggaaaggagccaattgatttcaacagaatcagatctgagcttcataaagtctttgaagtgacttcacagagacgcagacatgtgcacttgaagatgctgccccttccccggtacctagcaaagctcctccctctttgtgtgcgtcactgtgaaacccccacccttctgccttgtgctaaacgtacacagtatctagtcaggggaaaagactgcatttaggagatagaaaatagtttggattacttaaaggaataaggtgttgcctggaatttctggtttgtaaggtggtcattgttcttttttaaaatatttgtaatatggaatgggctcagtaaggagagcttggaaaatgcagaaagttatgaaaaataagtcacttataattatgctaccactgataaccactcctaatattttgattcattttctgcctatcttctttcacatatgtgttttttcacatacgtacttttccccccttagtttccttttattttatagagcagaaccctagtcttttaaagagtttagagtgaaatatatactatatcagtttttactttctctagggagaaaaattaatttactagaaaggcatgaaatgatcatgggaagagcggttaagactactcaagagaaatatttggaaaataagctttcaatattttctttctttctttctgtttgagacggattcttgctcggtcgcccaggctggagtgcagtggcatgatctcggcaacctccacctcccgggttcaggtgattctcctgcctcagcctcccaagtagctggaactacaggcacccgccaccatgcccagctaactttttgcatttttagtagagatggggtttcaccatattagccagtatggtctcaatctcctgacctcatgatccgcccgcgtcagcctcccaaagtgctgggattacaggcgtgagccaccgtgcctggccagctttggatattttctaagctttatttcaaaagctctctgtgctatgttctctataaaaaacataatgaaatttgaaatgattgttattataaaagtaagtagctttttatgaattcagaatatacgaacttttaaaagcacttttaaaatatttatcaaaataataaacatgttctgacatttttaaaataagtgaccttgtgttctttaaccagtctacatctttagagatcaaaaatttatgttattatgggctatgcgaatgacctctaaaaaacatcagaatatttctggctatttaataatagctttatatatgactactgctcatttctgtgtaattctgtttaatagttgctttaaagttgaattcggctacatttactttgagaacgatataaagagatagacatgaacttgaatttcagtttaaaatcatgcaagataggaaaaaaaaaccataagaaaaatcaactgataaactgcaagaaaaaaaacatgcaacttataccacaaagggtaattgctttattatttagagagtacttaaaaattcaaagaccaaacttctctccaccccacaaaaatagataaaggacatacaggtaggtcaccaagaaagaagggcaagtagccagtgaatatatatagagatacttgataggacttttgcttagctggatctttagcaaatctcttttatttcttgggattttgaagaagtaacttttaaaagaggacttaaaactaaatgcttgggaattggccttttttagaatgaaaatttcccaacacaagaaaaaaaatcctgggttctttattttccagaatggagtaggtcactgagcaatatgattaataaatatgcaatgcctctgacttctgttttgttttgttttggagacagggtcttgccctggggctggagtgcagtggtgcaatctaggctcactgcaacctcacctgtgactttttaattgcaagaaagccaaaaggtttgttttcgattacatcatttataatgggaaatactgtatatactatgagtaaaatactatattgcctaacttgtattattaaacaattctgctgacctttgaccttacatttacatctgaaaagcagtgtgataggagttattaagaaattattttaggcagatagagacgaaaaggggtccttggaacgtttttgtttcttttaaagcagctccagaaatgtttcttgtctagcaggaaggccctggctcttagagctgggccagcaacctttaacaagcaaatgccagccattagaaactgggtccacccaacatggtgatttccaccgttttcctcttgccttagccctgacgtgtgcctgacaacatggctgcccccacatatctcaccacgtgtagaacatcttggtgtcctgcatttgcatattaaaagctagggtgggaaggccagtttttcagtctatgtgaatgacatccctggtcaaaccaatcccctgagccctatgcaaatcagacaccacctcctccagcctctacatatatttggctattttccatcccatgtggggggtctcctctcttggctttggagcccccctccctctgtctctgtaaaggggagcttcttccttctttcttgcctattaaactctctgctccttaaaaccaccccatgtgtgtccgtgtcatttttcccaattcaatatgagacgaagaaccaacaggttcctctgttactgggggtccttgcttccagagctcccaagatggtggcgagccacttccaaaatggcggcaagcttcgtgttctctgacctggggttcttggcctcatggattccaatgaatggaatcttcggccatgtggtgagtgttatacctctattagaagccgtgggtcctggaagagaaccgtggaacccagtgactagtattcagctcggttaggatgaacccaggcacttagccgtgcaggaacaatggcaagcctttagcccgattggaagtggcagtaggtgcctcgctggatcaggagcacagcggacaccctgccggatccggaggaatggaagtcagcggtgggtctgcgacggcggcaaacagcagtggtggacggtgagcgaaagctcagctcaagccgtaacaaacacagaccagaagagtgcagcggcaagatttaatagagtgaaatagagtgaaaacagagctcccacacaaagggaggggacccaaagggggttgtcgttgccggcttgaatgcctgggtttatatccgatcactgtccctcctgctgtgctctcaggcaacagatgattggctatttctttacctcctgttgttgcctaattagcattttagtgagctctccttactatctgattggtcaagcgtgagctaagttccaagcccgtgtttaaaggtgaaagtggtcaccttcccagctaggcttagggattcttagttggcctaggaaatccagctagtcctgtctctcacctccactcctcagagctgtatcattttggtgcatgggccagcaaaagaaattcattcatcagactggtgagtatggagtggatctcaactttaaatctgtcctttaatctcaaggctctcttccagctaccctgtcgccaaactttctctatctgcggtctcttaccctctctgtgtgtgtctaatgtgcaggaatctttacagttcagggaaacagttctgttagaaaagatcacgaatcatggcaggcagtaattcaataaatgtctcttactctctacggtttctgtggcaagcacatggtatttctaagccacctagtgaaaataaaaatcctctttatgagacacattgctggttctctgtggtaacttgcagcttcgcaactttttcattttgcacttttctactgatacttctgtggacgggaaagctctgcttttaacagttaggagtaagatgtcttttgtagccaaattttagtctcgatattgtcgcactggcagaaaaacgaacattcagttccttcatttctttaaggcatgtattctgtctcctattaagatggtacttaattagtgagggaattttaagtccagaaattaaccggaaccatttttctatgggtaaatgctttagcacgggctataatagcaggatatagagttcaatctagcacaccccctcccttacagggaccttgcccaattatgtgatttttcttgagatccatttaggaaggaacacaggccacaccagtctagaacgtcaaagggaaataaaaggtagaggactaagactgcttggggacggcatgcctaaggtccaaaagtttagttcctctagtgccatggcttggggggtcacgcctgcagtcatgggtggcacatttaaacgagtgctgggaatccaggaaccccagagggaatatagttggggggacgccctctactgtttttctctccatcctggatcacataccgaaaggaaggagactaaaaggatgcttttattctcacttctctttctagttgggtaacaaatcatcttttaacatgcactcccctggagtgtattttaaagcactgggactctttcaacccagaaactttgaagtaaaagtggcctattttcttttgcacaagggcatggcctttttacttccccaaaattaaagaagcaagttccaggggaaccatctgaggatcccccttatttgggggcccttcacgttcccttctcattgcagggcctcagacaagtaaaaggagtcttaggctgattttctgacaacactgataggtagatagaagctttccaaaatttaactcaggtatttgacctctcatggaggaatgttatgctcctcctaagccaaactctaactacagctaaaacaggaagctctgcaagcagaagagaattttggagatgagcaatatgtctcctgtagtaggccaaaagggaaaagagaaaacagggaaggcaaagaaataggggaaacaccattggcaaccctaattggaactcctttctaaagtgtttttacttcttttgtggtttaaaatggattctctctcttttataatgttcttccaacctaggaaaggttaattttccaaaccttaaaatgcttggcttagagttgagctagggggaagggaacccagaagcctgatatgttggcaaaagggtaaaaatttcttactagtcaggcttttggcttctctctccctgtgcaaaccagtaaacgggataataaggatcatagtttatattctctgtgaatttataattaatgaaaaaggatttgtgaggttggtcttaagctgtagacaatctgatgtgctttgcatgtctttctgtatggttctgtcaaagaaagggtacccttaggttaggatgcaggcccaggaccccataagcctgctgttcaacccagcccaacaaaactgtcagtaacaaacttggctacaggcctccatcttgtttcatgtccttaggagcataacctataactgcatggcaatacattgttttagtttctgccattttacaatggtggctgtcttcttgtgctaagtcagttcctgggtgagggccacaaagtcagataagacagtttgtcaatctggatggtgccagggtgagcagggtttacaaaatatcttaagcactcatcttgagagggtcaaaatcttgtagcctccagctgcatgacccctaagccacagtttctaatcttatggctagtttcttggtctggtaccccggcaagagggaagtatatcttaacaaggggcggttatcatctttgttttaaactatacactgtaaaccaggctcctcacaaagttggttcagtctatgcccagggatgggcaaggacagcttgggggctggaaaaaaaaatggagttgcttcggttggatctctttcactgtctcagtcacaattttgcaatgacagtttcaaaagctgcctatctccccttaaataataccttgtacacttgtggttaaatcataacctacttaagccttgtcggtttaacctgtgaggtgactttttgtaaggttaaaaagccaaaaatcttaactgcttggtgtggctaaagtcaagtaacgaggaatttaaaagaattttcttaaagagtgctcagcttaattaaaagtggatattcaagttataggtatatttaaaagtttttctggaaaaaggctcttttcttctgtcagctgaattatttttctccattttttgtcttaccactcttaatgcatgcatgagaggccctaagataacttccggtagcatgggactccttgggaaaacttctgatagcatgagattccttgggaaaaaccaaaggcgccactttgcaaaacaaacaaaaaaaaaaacatgttttcctcacgagatcccaggagttaaaagaagatagatccctctcaaaatcaaaggctgtgttctgttttgcattgtgttatctgatggttttgagttttggggtatcaaaaattacttcccattatgagagagctttggtgtgtaggaactaggtaggaaatatactttaagggatggctaatagtagttataaatcagagaagcatgctcttggccacctgaaagatatggaaacatccccaccccaccccacccccaactaagagatgagactcccatgggggatgggctaattacaaaataagccgattggctttggggtgccttgcaataaaatacatgatagaagcactacactgtcttcccccatagtatctatatggtcttttcataaattgagcattgaaatagaagtatagcaaggaggtcttaaaacactaatctgccctttagtaaaagggttataaaaggtttgtaaagcttttacctcatggtcaaattggttaagattagatggaataatctataaggtttcatttaaacaaattggggttaacattaacaaactaatgcaagggtaaaatttgtctttgaacaggatttccatgtcacagtaaaggctaatgaaacatttttgccttttgagtcatcattttggcaaaataatttatggcaatctggaattctatttcataacatcaagtgttcaaaacctctaacatttaacagtcatctcaaaatcaaacttcaagtttcaaaattttccttcctgagggctggctttttggatcgttcagagggcccctgaaacattcagaaaagaggtaaacatgattatttgacaagtttagtcacatgagattgccaaaatgatgtccaatcttattttaagcatattttgatgaatatatgttccaaaattatataggatttccaaaattctaatgtctaagtatatgctatcagtcataattaagggtaaaattattggtagccattgagataaataaacttctttttcagtcgtgtttttaactgtaactatcatggaaattttgccattcacagacaattgttgtcttgctttattccttctcaaaaaacggttcataaccaagctatattaaggactttaacaggtgttctcaaatgcaggtttctaatagcttttaatagctttgaacactgtaacacaggaatagagaaaggacgtacgggactcataaaaaactgacatattcgcagatatcaagcaaaacaagagttaactaaagggactgtattcagaaagttaaagcaaaatttttaacttttgcttggaatattgctgatccttgttttgtttttcagagtcaaggaaacttattttaagctatttatggcctttaataattgagtaagttttactactgtgaacaaaatttggagcatgtttatttttctctgcctggttcctccggaatttggagactatctgtctgtgagtactcttaacttatggcagtatagttgtttgcatcagtgcaataagaatcctttttttttgtttttttttttttggcaacaggacacaattgggaaaactggttattttaccaaggctttgactgaaaggatgtgttcccctttaaggaatcaagcttgacatgcagagccaatgaaaggcccttggggagaactggcctcataccttatctacacacagtccctgcacatggttcctaacctgtggtcagtaaagaatgtcactttctaacaggtctgggagctctgagtttatcttgggatctcaagaggtgaggatcacccaactcacaggtatttgtggatacaaacccatggtggacttggctctgaaagtcttatctggaagtccttatggaacagagtttcatcaaaaccaatccaaaaggcctatgtagaaataaccattcttgctgcactttatgcaaataatcaggccaggtataagactaaagtttattctacgaacaacacacacggtcctatcataatttgtttttaccaaaaatgagaactggagagagaaattgtgctccaaagtttatcatacatttgtcattaaatcctagtttcattaattgtctttaagttttttgcctacattttaaactaactctgcttattcctgtaaatcaagtgatctcctgcagcttggaagaaacaaaaaaggatgcgtaatgtaaaaatctggatcaatatgctagttctgggcaattatcctgcaaattctgccaggtaatgaaagtgagtagggtgcccataaactggaggtttccttttatggggaaataaaaccaatgaacttcataaatcccaaagggaaattgtgtatcttagaaagtaaaattttagatggaaattatctactacaccacacttgtgggaattgctatactcactctactgtttgtgatagggttatacatggtagcaccttctaactgaaatattggacagaaagtttccattgctgtatatgttgcttaattattatccttataggagggataatagttactgacaagaaggaagcatcaaagttttactgagtctgctaggactttttattgggattagtgatgcacttttaaataaaacatgctgcttctggattaacacctctactaaagtacaggaaaacctacagttacttaaagatcaaatcaaaatcattaacaagctcaggaaaaatgcaggctttagccctgggtggctacagtccctctttaatgaattccagtcttctttatggaattggttaaaccctttattaagccctctcttgcttatatgtcttgtattaatacttgaaccctgtatactcaatactgtaactcaaattgtttcttctcctctagaagcaaccaaattccaaatgggtgttataaactggatcacgcgtggacacgccctatttccaagaacccttagacagaccccaggaagagccctagctgctgttccccattcaacgtccattttcagcaggaagtagccagaaaaagtcgtcacccaataaccccctaacagcaattaggttgtctccatggggggctggggggaatgtgataggagttactaagaaattattttaggcagatagagaggaaaagcggtccttggaaagttttcatttcttttaaagcagctccagaaaagtttcttgtcaagaaggaaagcccaggcccttagagccaagcaggcaaccttaggtatgcagataccggccattagaaattgggtctacccaacatgatgattcccatggttgtcctcttgcccttgcgctgacatgtgcctggcaacatggccccacctatccccacacgggtagaacatcatggtgccctgcatttgcatattaatagactagggtggcaaggccagttttttcccgggctatgtgaatgacatgcctactgaaaccaatccgctgagccctatgcaaatcaggcaccgcctcctccagcctatgtatacctggctggtttctgccccacttgaggtctccactctcagctttggagcccccgtctctgtctctgtacaggggagcttcttccttctttcttctcccttcttttttgcctactaaactctccactccttaaaaccactccacgtgtgcccatctcgtttttttccaattcaatgcgagatgaagaacctggtgttccttcacacattggagccctatcagcaggggctggacaccaattgctctctgaagctattcctagccctaacattctttgttttgtttgctgttttggcacactaagtgtgtaaagtttatgaggcttaaatgaaattttctgtctctaccattacaatgagaaaggagtaaaatatttttattttgcaaatctacttatggaatatagtttctaatatacttatgttttaaaagccttcaaaagccaagaggaaacaaaatactacccattccttctgagaaatgcacttctttctgtacctgattgttctcataatccctgtgttgatatgtaatgccacaaaaatgctcttgatagtaacaggaaagaggatcagacacagctaaccgtaaaggtcagttggctggcaggtgcttagtagatgcaaatagaggcccattcatgctactacacctgctcctgaaaagcataatgcaaatacagtatactaatttaggaggcaaagaaccatctaacatcaaactttaaaagagttggccacagtttaatgacatccctgcacaccagcctccacccacactgcccttcataagcccctaaaaggagattccatagttctaaacctggtctacaaacacacatatcctcattctctccttttcttctctttggcagtttggcaaaatctttagggggagttggaggaaacattagtgtttaatctcctaaatccccttcattcaaagctttggcttcaagttctacccctgttaaggcctcaggaagttcactgtcgacaccctccctttgaactcagtcactaaaatgatctcaaggctaagggatagaccacagctccacttcacaagtaagcttgcaacacctgatttaggaaagtttgctgtgcagacagttgtagctcatcccttttacagaccaatcttgatttgtttcctagggttaaaattatttaaatcaaaatctctcagaactttgtgggcatttggtaaattcatgctgggggagaactggcagagacatgttaaatgcacttgaccacaagaaccgtttatttcatccaatatttaccagttattcattgtacacctactatagattttggcactgtagatatgagaaaatgctatccctgactcacgaaacttatccaaaaagtagagaacaaggctcagccattcaaatgaagcctcagttgaatcaaataaaaataagttttaaatatttaatgtgaaagtcttcgagtatgttaagaatggcttaactcagggatagaaattttactgattgaaagaaaatttcaacaaaataccaatctttgaatctaatttgacacccgaaactaggcaatcaaacattagcactattttttcttctatagtttataataaaatttctcatgagaaaaaaagacatttttcttccaagcctgaaaatggatggagaatttttaatatttattgttgctgagaacagtaaatagactatccactttcacaaatgaaggctggctttgagccacagaacatatctgttatatcactctttgacaccatatattaacagaaataataattttcccgcattgagtttcctatttaccatctctttaattatacccgctttaattgctgtcatggagtgttgaattttataatccaagatactaagatgtttatctgatataccacctccacacttaatgtcttataatctctgccaagaatttaaaaatttttgttggtcggacaggaagaggaaattccatggtttggtgaacccagaaattgttcagtacatctcggttataaaactgtgttaaatacacttaaactctataattctataagacccattttaggtttatacactgagcatccagttcctcaccgtcctctcataggttaaccctgtgtaatacaagttctgctcccataattctatgaacaaaacagcccttgatatataggtttgattttttaaatacattttctttactttattctaaatgtaacataaggtcaacatagaaaactgaaaagcataaggaaagtgaaatatctgtaatcttatcaaccattgttaattttgctgtattcctagtttctttttatacatatcaatatggtacttttgttttaataaaaggactgccaaaaggcacatgccaatttggactctgctttttccacttacaatgatatcatagtttctcatatttggtattcttttgcaatatttgctgcatagaattccatcacacaaaggtaactgccagaaattctttattacttttgctagacacttagggtttacattttttcaaaaattaatcacatcagagttttgatcacatcagagctttgatcacagctctgatgatttctctgggaactgagagcctaacacaagtcatgtccactttaagacttttaacatactgaaaagttatgttacagagtgctggtccccctgcaacacgttcactcacattggctgacgttttaattctttgccaatctgaggggaagaaatgtcaactctttgtttgctcttttaatgtcagtcatgtccttttccttttaccggtcattccggtttactcacaatcctacaaatcaatcctgctcattcttaattttccagtattgttcctcagattgtttcaccagaaaagttctcccccttatccactcttcacctaacaatttctacccatccgaatccttctgcatttattgcttccaggaatttggcacttaggacacccttgtccttacattgttcatgcatgtatatttcgtcttcaataaaaaatttagttgctcaagggcaagggccccatagagtctcaatattctaattgcctggtgttgcttaataaattagattcggaagggtcccctccagggaggggagcaaagggcaaattaccttaggggctgggagtgcagaagccaaacctttgagattgtgaaaacaagacggccccgagacgatccagtagcaggcattcaagcaagaaaaactcaaatattgttcccaataatgcctgactaatgccaaataccaagtaagggcccaggcagtcctgacagcctgcagtgccccaggataaaactaaccctgaggggtgctagcccacggtgaccccctgtctagactctggatctctatttttaggtcgaagtgctttattcttgactcccgaattcccggaaactattaccaaagcagcttagttttctctccaccctgcctgggtcacaaatatgacggcgagccagtcctttcccacaggacgcctcaggcttccgggatggtaggccaagggcttagcaagaaaaaaggcggcctcggggaacctgttctgttaggttccgccagggcctccccctgacctctcgaaggccaagggctgcccatgaacgccgaggctccgccccgcggcccgccgattggccccagccgccctggtgactcgacgcacttccgccccgggcgcggctcgggccacgcccacctgtcctgcagcactggatgctttgtgagttggggattgttgcgtcccatatctggacccagaagggacttccctgctcggctggctctcggtttctctgctttcctccggagaaataacagcgtcttccgcgccgcgcatggagcctcccggccgccgcgagtgtccctttccttcctggcgctttcctgggttgcttctggcggccatggtgttgctgctgtactccttctccggtaggaccccggggcgggttcgcgcgtccgcggcgagactagagctctcctcagtcgggcaagagtcgcggggcggggctcacagcaggccgtgcctgtttggggacagggttctctgaggggtgcagtgctcagatcccgggggtatgtggcggggaatgcggggaccacgcagagcccgaggtgaagcttgtttggtggcgtcgtgtgcgcggccagcatttacgcaggatctggctgcgtccctaaaaaaagcgtgaatcgtgttttcgggattgagccagtcggccaggggagcgcggactgggcgccctaggtgagggcttgttctggagtgcacaggtgcgtgggagtgttgctagggcccgtgctgtgtccgtggtgagagtttgccctgtgttcccttggtgccttggtgagtggggtgttcattagggcttggacagtacccgcggtaagggttgcagtgcgtctgctgtgccccatgtgctgggctgggcgagcaggggcctggccaggtgttgctgggagcgtgctgtgcgtaagtggcctgtgtgcagagttcactgtgggcaagacagctcaactgtttgctttgaatggagtgagcgcggactctggggctagggagggcatgttgagtgagagcaggctctcggtgcctggggttagagaggtggtaagggcgcgccatgctttttgtgccttctgtgaacagtctccgtgttacctgagctcctattagtttgtaaatggctgcttttttggggggtgggtgggccatcgagtcttcttcctgttcccaaccaatatagatagtatctgattccattgcctaatggctttttgacattgttttccttcttttcattactttgagtcatatttgagagatgtgaaacaacctaaaaaacaatggtagccaaacctagtgagaaattagtatcctaacaaaggaaggcagataatgttaatcttgttttcccctgcagctcataagctaaagcttaaggcctatcccactaaatttattttgtatttcattgaatggaatcaatacttttaaaaatgcatgctaggccaggcgcagtggctcacgcctgtgatcccagcgctttgggaggcccaggcggggtgattgcctgtgcccaggagttcaagatcaacctgggcaacatggcaaaaccttgtctctacaaaaaaatacaaaaattagctgggcatggtggtttatgcccgtggtcccagctactctgggggccgaggtaggagattcacttgagcccaggaggtgaaggctgcagtgagctgtgatcatgccactgcactccagcctagatgacagagtgagaccctgtcaaaacaaaacaaacaaacaaaaaaaaaacccgctaagaaatacatgcttattgtgcgatacgaacagaatcaaaagacagctatttttaatattttggcatatttgtttctgccttcatgtgcgcgtcatgtgtatctatgtccaaattatatttaggatccaataacatgtatagtttctacgttgcatttttttccttaggagcattcattcaacgaatatgggtcttgtatgtctggtgctattacactggtaggcaataacaaaccattcctattttcttgatccttttttcactatttgtttacacacacattcatgcaggaagataagcagggactttgttttgctcaatgataagtgctcagtgccgggaacacagtagataaccaataaattatttgctaaaatgtattgggattggcagacattaaaatccaaaacataatagtgacaaataaattatgaaccaagggaagtgctctggaggcaagcagtataattttcagatataaatctgacagcatttaacaaatgattggagagagggaaggcttctctgctcatcaaacagactttggggcatctgtgcttgctgttccctcagcccaggaacattctcctcctgacctgctgcagaaacagtctcgctcttctgcaaactcagctggaatgttacaccctcagagaccttctctgatcaccccacctcgcgacccccccatctcaggttgaacacatacaacccagttcaagtccctcttcacttgtaatcacccttttaaaatgaccttttctgttctttgtctcaccctgtcagaatgcagggatcctgtctgtcttgtcgcacttgtggttccaaaagcccgatttgtttacctctgtatctgttaaataccagaaaattaaatatactatttggctggggcttagagcctaggaaaaagttcctcctgcctccaagaggaaggttctttaaagagctatgctcaggatggtctttctgcggtacctaaaaagctagggcagtggcagctgagagccagaaaggatctgtctcccctatttgttgactctgcagggcttccagtacttcagtcttgcatctcactgatcattaaaacgttcattttgaaggagggtaatgggagtagggagtagtggtgataagaagaaaacaaaaggactttttttttttttcttttaagattaatgtttagaataggcttagtgctagaagttcagcctggacagcataagcagacctcacctatacaaaacatgtaaaaaaaaaaaaaaaaaattagccaggtgtgatgttgcatgcctgtggtcctagctacttgggagactgaagggggaggatcactggagcccctcatggtcaaggctgcagtgagccctgatcatactccagcttggataacagagcaagagaccctgtctcaaaacaaaacaaaacacacacacatacacacacaaacaaacaaaaaaagaaacaaaataggaagctgaagaagataatgaaagcgatttgaaatagaggaacatagaattatgaaatgaatagggtgcaacatggaaaataacaaaactaagaatgaagagaaggaaaagcaagcttaagtttgaggttcataagggtaaatcaagacaggtatgaaacctagagaaagtaaaaatgagaagtcacgatgctaggcagagagaatacgtgaattaaaataaacattcaatttttggagcaactcactctcacaaggagaaggtttcgtaagcagacagtgctgtgcatgggagacctgccctctcaaaggtagttgccaaatggttccagatagttgaaggaaacatgtatcaaatttcaggccagtctcattcctccagaagaggagctgcttttttggacaaaacccgcaatctcctgttgtgcgtggtctcttctgcctattttaggtgttttccttatttccagtgaaagaagccaagatcagtaagcacttacacagtagcgtctcagtttccttactgggcatactacaatgcaaagagagcagtccatatctggtcacctgccaggataccagaagactgggagataggcagcacaagaaatggcctaatcttctttctccattgtgctgtagaatgattattttcaatatgaaattgattacaatatattcttcacattgttttgtgtttgacagcagtggattttgaataccaaattttttttgaatagctactctgagtgacatattgtgctgggtgttgtggccacatggatgaatggagttggccttgttaactattaaacacaaaagcatgtgatagttacctgagagatccatgcaggggagagtccaggggaaggtgactgatcactgcttcccagggggaggcagaaaatgcttcctggaggagatgatgggtggattaaggaagatgagttgagcaggagttgtagctaccagccagggaggaagggtattcagagcagaggaagcaaggtgagcaaaggcaccaagatgtgacactactggactgccaagctattcagtgtggcagagtagggcaaaggaggcaagaaagaaggaagaggattaaatcacagggtgagtaattctgaaaagcaacagactcatcaggagtaaacactcaccatcataaattcagactttcacgttattacctgtccttttagggcaacttgagccttttgtttgacttagcacaacatgaatccaaactagggttgttttgattttcccaggcacggtagcagacaatttcttgaatacttatttgcagatagagtttgtcagtgtcagcatttcttgtgcacccacaaggtgagtatagtagaaaaagaagaacatggttcttgacccccaggaacttgccttttaagagaagacaccctgaagtgacaagctgttataagttagtgttttaaactatggaagaacaatctgagcagagtactctatactgtagaagacttcttagaggagaagttacttttgaaatgaatttagaaaaatgtggggaaagatgcatccatatatattttaagatcaaagacattaatgctgtctcttcagtttattgtcgaatgtttattcccaaacaaaccaaaagctaataggatgttacttaaaacatgcaagtcccatttcctccactactatgagcactcaggtaaaagcatggaacagtcatttaaaatcttgccaagggcctttctgttttttctgtactacctgctgccagaccacagtccatggctgatgaaagtgatatcagtacttcatcttcatgttcctattctcttatccctagatgcctgtgaggagccaccaacatttgaagctatggagctcattggtaaaccaaaaccctactatgagattggtgaacgagtagattataagtgtaaaaaaggatacttctatatacctcctcttgccacccatactatttgtgatcggaatcatacatggctacctgtctcagatgacgcctgttatagtaagtaaacaaacctcttttttttttctgcttgctctagagatttgcatacattttggggtacatattccactacggtgatgatgattttcttcttgtaaaatgaggttcaagataacaatgcatttttgcaagctttgagaaatcaaaatctccaagaaatcattttcctggcaatagattgcctgggtgaatatgaatcttaagtttgcccttataataagtaaataatgaaaattatattcccacccattcaaaagagcactgcagaattttgattttgattcagatctgttttataactggattgaaaactatcaaaattattttctttcaggagaaacatgtccatatatacgggatcctttaaatggccaagcagtccctgcaaatgggacttacgagtttggttatcagatgcactttatttgtaatgaggggtaagttgctccttagaggaaataagggaagtgttagtaattttatttttgttttgcttctcttcttaagcattcctgtaaacttaattttgctttctatgtgacaagttatacttctagccaaacaactcttggatgttttatggagataggcaagatatatagtaaatagaaagtaattgatattgaaggaaagcaaaactacttgctgtttctgacaataagtctgttgtaagcattaagaatgtagtaatcatgagaatttgtccttcacaactgagtgtcccctatttaaatctgccaactcttagagttgaagtagggctcacaaaaatgagaaatagaattgccaactaaagatacacttgtatccagatgactctgtaaagtgttatcagaccaaaactgacgcggttagcctttaccatcatgttgatcaaaatctctcagttgaaaaaccttatttttgagactgctacagtgtgaagcatctcaagagcaggtactgagccctcggtaatagcctttgttctgtagggttttgaagttgtatatattggagatactagacatttaagataaatgtgcatttatagagtaaatgtaagtattctgctataacagaatacttgaggctaggcatttataaagaaaagaaatgtatttggctcatatttctggaggctggagagttcaaggggatggcagtagtgtctggcaagggcttttgtgctgcatcataacatgctggaaagtgaaagggaaatttagcatgtgcaaaaaagacaaagcacaagggagggggttctcgctttataacaacgtgctcttatggtaatgaatccaagcctacaagaatgagaactcattccctgaagaattaatgaagaccctctagaaaggcattatacctcttaatgacctaatcatttcttaaaggccccaccacctctcaatgctgttacactggcaattaaatttcaatatgagttttggtagagacaaaccagattcaaacaatagcagtaacacaccataatatagaaaaagtaagtgagtcttggaggaaaaatcagctgtgactatgtaaggcaactgacagtttttaaaatttggtcaagtagaaatattggaatattcagttgacacatactgcttgctaggcacaccgagggataccaaaactttaagacagtgaccttcctaaaagaagttctaaccttattgagaaataatatatactgagagcaataaaagcaaaatactaaatgagaaataccaaataagtagaattattcatgataattactctaagagtccagaaggaggagagattcctgtgaatttaaatcagggaagatttcattgagtataggggtatacttaatgaaagtattcttatactcagtgagctattcctagaaatacactctgttctaaataatattaatagaagctaaaactcatgtagcactatctatgtgccaaatgctaacttatctaatcccctaaacaaccccatgtactgttatccccttttaatcaattaggaagctgagtgaaggaactttaagtgacttacccaagctcaagaaactagataagttgagaagcagggacttgaatctagccattccagctctagggcctgttctctctacacagtccttgtccttactgtgcaaagtggtgtgagaaaaggcacagaaatgaatgtgtaatgtgattgcaggaggcagcaaagaggctgggtggaaaggcacagcagatttatttagacatctttgctcttggccaatatatattcaaatggggaaactctatttgattaaattgcagatttatttagcactttcgttatatagtatgttgtttaagaaaccaccccctcaaactactgtagtgtagaaaagaaaccatataaaaaattccttcattattatgtgtgtcttattaattgctatacaaaacagtaaccctttcttttctcatttagttattacttaattggtgaagaaattctatattgtgaacttaaaggatcagtagcaatttggagcggtaagcccccaatatgtgaaagtaagtaaattctttttttttaaatttagaccagtagtcctcaaagatttttgcctcctttacaccctttacactttaagattaacaaagatcccaaagaggtttcttttatgtgggttatatctattggtatttatcatattggaattcaaacggagaggtttttaaataattattgattctttttggttttgtttgtttttcctaagacacggtctcaggctatttcccaggctggggtgcagtggcaacaatctcagctcattgcagcctcagcctctccagtagctggggcttcaggcatgtgccactatgcctggctttttgtaatttttgaagagacggggttttgccatgatgcccaggctggtcttgaaatcccatgctcaagcagtctgcccccgtgggcctcccaaagtgctgggattacaaatgtgagccaccccacctggcctgattaatttgtaagaataaatgcaatacaaattaacatatgtaacataattttgatgaaaaataataattttccaaatcaaaataaaattagtgagaatagtggcattgttcacattttttgcacatctcttcaacatctggcttaaagcaagattgtatttggcctgttgtgttatcacacaatatgtagcctttggaaaaatatcactatattcttattaggatcagagtgaaaaaagacaataatattttggtggtattgtgaatcaccaatttagaaaatggatatatttataaattgcaaaggatttcttaactagcaccgagttaagcatattttctcattaattgtcagcatttcttgtgatgactagaacagaacttagcatggccttccaaataaatacaggcgtattaggccgttttcgtattgctctaaagaaatacctgagactgggtaatttataaagaaaagaagtttaattggctcatgtttctacaagctgtacaggaagcatggtgctggcatctgctgggggtttgggtaggcctcgggaaacttaacaaccattgggaaagacagaaggagagcaaggtgtctcacatggcaggagcaggaggagcaaggtggggaggacgggaggtgttgcgcacttttaaataaccagatctcccaagcactcagtatcacgagaacagcaccaaggggacggtgctaaaccattcatgagaaatccacccccatgattcagacccctcccaccaggccccacctccaacattgtggactacaatttgacatgcgatttggtggggacacagatccaaaccatatcaataggtatttacactttaagaaaatgagatttgttctgaaagttagttactacattaatggtttgaatttgggatgatatatttgctcatagaaaccttcttttaaatccatattgaattcacaaccagcttgtagaaaccctatattgacaaatttattgaagacacagaaattttactaatgctgtcttaatcttttacatttcctttcctctttttcttcatttttaagaggttttgtgtacaccacctccaaaaataaaaaatggaaaacacacctttagtgaagtagaagtatttgagtatcttgatgcagtaacttatagttgtgatcctgcacctggaccagatccattttcacttattggagagagcacgatttattgtggtgacaattcagtgtggagtcgtgctgctccagagtgtaaaggtagtgtttcaatttatttccttcttcatttgtaaatactatggaaacattttgtaaatagtttcatctacagataaacaaagcaggtgtatgtgcttcctcctcctgtataattggtttctaatttattttaattcaggtcaattcaagtcaaaaaatagttctagctagagttccctatttctcacccctacatgttcttggcatttcattttatacagtgtgaactactgtgtacctgcatgagttagaagtttttgtttgaaagaaccaaaaaaaaaaaatacacactggcttaaagaaagtttcatcttgtattacaagaaatctaagagttctggctatggtagtggtaaactgtgacagactaatcgtctcacaaataaaaatgataaactctggataaaaaaaattttttttttaaagaccaaatgtttaaggcactctggagtgaccaaaagtatgaagaccatgtaggggacttgcccatttaaagaaagaaatcactgaataacagtgatttaaaagtatatactccccaagtacacatgaaacattctccaaagtagaccatattctagacaataagacaacttttaacaaacttcagaaaattgaaatcattcaacatgcattatcacaatagaatgaaagcagaaatcaataacaaagccaatccccaaagaattggaaagtgtacaggacacttctaaataacccatgcataaaagaagtagtcagcagggagattagaaagtgttttgaattgaataaaaacacaacatctcaaaatatccaaatatgtaggatgcagctaaagcattgcttacaggggaatgtatagcataatatacttgtgttagaaaaaaagaaaagtctcaaatcaatgatctaattttccaccttaagaaactgaaaaagagcaagttaaatcccaaactagcagatgtaaggaaatgataaaaatagagccaaaatcaatgaaattgagaaaagaaaaaaaaatagaggaaatcagtgaaaccaacagttgctacttggagatcaataaagtgtgtaaacctgtagccagactgacaaaaaaagacgcaaattaaccaatactgagaatgaaagaagtggtggccaggcgcggcaccccagccagcttgaagaccctgccctcctgcagccggcaggggcagtcactcccggacttgtccttttagaagttccagctttaccacttgctggtggagcccaaccactgccgcagggtcctcatcgccaacacgcctggcagatccaagaggagatggcccaggatgagacgtggcacacacaggcacccgagagtgtggggttggcgttgttccactgcctggtttctgcagagatcctgtgcctgtggcctgtgcccgccatgtggaagccagagggggtgtgccatgccccccgctttggacactgctgcgtgaaggggccagttttcagacctttgctctgtcacctcagcactggcgccaggagccctgaagagcagcatctgggagacggacagccctggggaaaatagaggaggcgttcagaagtagctagatgagatatttgaaatactgaagaccaaaaaccccagtttgcatggaagaactggcctcagatgtggtcagttcctatgatgacctggacacacggtgctgacccacacgatgggaggtggccctgcaaagcattcagaggcttgggcctgctgccgtccggcctcccacctccagctgcaattgcattctgacctgggcaagtaggaacacgtagtggagatcctgatggagacctgagccaggcgtcccggagtgctggccaggcgtggagtacgggatccagctaagggagactggccagcctatagccccccagccttgctggctcctctgctaattccagcagggtctgcagccccagacccatccccttccttcccgtctgcagagggcaggccagaggctggtctcagtgggagctagggctctcctcaagggctttttgaccttgggccagtcttgacatccccacagccctgcgcccctcatcacttttcgtgtctctcggagacggcgagctgcaactgcagcaatcttgtttaaatttaggtaggtgaatttcttagaattaagtttcatatgttttgagcaataagttttcttaagatatatatattttaatctttttagttttatctctgaatattttttattttttttcaatgtattttttttctggaaacattctgtgctgctacattagagcctacacagtttagttggtacatttcattcttttaaggttcaaataagggattttattttccagtgagtttccttgcattgttaacaagtcaacagcgttaacgtatgattttttggttttttttttttgtatactttaaatttgtgtgcaacccttctcatttatgccctgtgttacagtgagagcttggtcaaagtggggaaaacacacacagctgctacactttttttttttttttttgtcattggaacatttgtgccatgtcttcctagacttaagtgtaaattatggagggttttatttgacaatttatatgtaaatgtcattgaaggctaaggttaaatctttggaaatcacaggcaccagttgatctttagagacctcagatcccctcaggtggcgccttgtgataggcggtgttctgggaggcttcctgtcaggttccacagcacaggcacctgctctgggcacggactgagctcctggggtgtgcacggagctgcggtgcgccagtcacatgcgcttggaaacagcgtgtgctgctggattggaaatgcctacgttgctctgttaaattggtgctggagccaaaacctaaggttaaatttaagtctagaatgaaagaaatctgaatccatgtaattaatggccgctcgatcttgagagtccttgacggccctgcctcaggaagtgaggtgggggtgcctacacctttcactttccttcctcacgtccaccccgtatgtgtttctcatcctttttctgacttccccccatcccttagccaaaaagctttatattcttttgtgcatatggtcattctttaatatcagtgatgtaaactttacttgattactttacaaaattattcaacagacaaacaaaagaatgaaaaagagaatatcactaaatatcctacagacatttaaaggatgacaagggaatattataaacaactttatgcctacaaatttgacaactgaaatggacagattccttgaaagatacaaaatgtcaaaactcacttgaagatatggataacctgaatactcctatatctaccaaagaaataaaatttgtagttaataacctactgaaggtccagatggcttcactggggagttctaccaaccatctaaggaataaatcatagcaattctacacaagcgtttcaagaaagtgcaagaggagggaacacttctcatcccattttatgatgatagcattgtccttatacgaaaaccagaaaacaaaaacattataagaaaattacaaataatatccttgatgaacacaggaccaaaaatcttcaacaaaatattagcaaaccaaatcctgtgatacataaaaagaaaagtaaatcatgaccaagtaggatttaccctatgaatgcaagattagttcaaatgcaaaaattaatcagtgtaatttgccacatcagtagactattaaggagaaaaaaaatcatgtggttatcttattagatgcaaaaaacaaagaaaatgtttgacagaattcatcatcttattttttcatgataaaacttctcagcaaactaggaacagaagggtactatctatcttaccctgataacagacatctacaaaaatctcacagctaacattacacttcatggttcaaaaaaattatacttagtggtaaaaagtaacattgtacttagtggttaaaaaaaccttacttacatttctgtctaattaataaagacctaattctggaaggaaaacagtgaggatgtccactcttaccactccattcagcattatattggagatcccacccagtacagtaaggcaagagaaagctattaggcacacatgttggaaaagaagaaataaaaactgtctctactcacaatgagatgccactaaatacctattggaaaggccgaaatgtaaacacacacaccccaaactgacaataccaggtattgacaaggatatggagcagatgaaactctcatatactgatggtgagaatcaaagtgcaatgaccactttgggacatttttggcatttcttataaagttaaacatactcttatcatacaactcggcaacccaaataaactgaaaacattttcacacagaaacttatatgaggatgttcacagcagccttattcataatcaccccaaactgcaaatcgccacatgttcttgagttggtgaatgaatgaaccacctgtgctacctctaaaagatggactcgtactcagcaataaaaaggaatgaactgattcatgcagcaacacaaatgaattttgaaagcatcatgcttagtgaaataagccatactaagaagactgtaatttcatttatgtgacattctgaaaaagtcccactatagggataaaagcagatcaatggttagctggttgtggaagtggggatgagggggaagaggggtaactcacaaaagagcatgaggaaattctggagagtaatggaacttttctgtatctttactatggtggtagttacatgattatttgcatttgtcaaaactgatacagctgtacacttgaaatggtgaattttactgtatgtaaattatatccaataaaccaacctttacaaataacattaggtacaattagacacaacaaaaggtcagtgaacctgaagacaggtgaatagaaattgaaccttatttaagaagaaatgttgactaaagaaagagagaggcttacagacctgtgggagagtatcaagcagtgaaacatacatgtaattggagtttcagaaagacaggagagagaatggtgtaaaatattatttgaaaaaatattggccaaaaattatccaaattagatccaaaacaacctcagatccaggagattcagtgaaccttcagcaggatgaataaattattaaaatttaccaccaccaccacccccctgcagtagtttggtaaaaactaccaaacaaaattttaaaaagcagccagtgagtggggaaaacaacaaaaacccgtattacatttaggagggcagggacaagtaagaatgacagccagccaagttttcttaagaaaatgtggttacaatatggttatctctgttagtgctgaaagaaaaataaaacaccctagaattctgtatgaaggagaatatattagttaacatttaaagtcttttaaaaaatgtttttaacatcttgcattccattccttgtctctgttcacactggaaattactactttgtactactttttctgctaaagcagatatccattaattctgaggtttctctaattttccagtggtcaaatgtcgatttccagtagtcgaaaatggaaaacagatatcaggatttggaaaaaaattttactacaaagcaacagttatgtttgaatgcgataagggtttttacctcgatggcagcgacacaattgtctgtgacagtaacagtacttgggatcccccagttccaaagtgtcttaaaggtacaaaggttatcttttttctgtcttggtttgttattgttgttgctgttcattttagactttatttctttgatattaactatcagtcatacaaaataactgaaaagaaacaattttagtatttaactctgtcttgtattcatttctatgccagatgaatgacacgaaattcacataaaattctgctgttgtgattttttgtgcttttccagggttcttagcacgttatgtacattgcatgggtatatgcttttaatatttttatgtataaaaagtgaattacaacaactttttggaattgaaacatgggcatttttatctaagtaagtcaacaatggcataattcatataaatgaaatgagagcaataactcccaagtggttgatcttctaacattattttgtttcctagtgctgcctccatctagtacaaaacctccagctttgagtcattcaggtttagtagcttcttccttatatgtcttcttccttatatgttacaagatataaggaattcctggagaaattgccagcaataactcccaagtgtttggtccaatctacattattattttgttttccagtgtcgacttcttccactacaaaatctccagcgtccagtgcctcaggtttagtaatttcctgcttatattttttcaaaaatcctttaaattcctggtgattttttataaaatccttcaaatttctggtgatgttcacttatttttagtaatgaaaggagggaggacatttgtatagccattttagttgttatacatagtgattctaaaattatttgccataatctgatataaacaggaatatgaccttgggaaagttgtataaattttgaatgtgtttatatatatatgtttacattatatatagagaaattgatttagtaccttccttattgggtattagtaaggtataagtgggatgcatttaaagcacttagcacagtgcctggtgtagagaaagctcttagagctagccaatgtgacttatcctacacttaaattaatgttagggaaggggaaggttcatgtatgtttgttagtatgtgtgtgtgttaatatgttaatatgtttgtttgttaatatgtatgttttgtgtcatcaactttgctattttattcttttcagaagtgatctgttgacacctttactgagtttgttcctattgcaggactctttcattttctggaatgcaactagtttgagtcttctgatgtaaaacatttaaacagggaaatttctgctgtcctcagaacaagatctgtatttctgcctcttccctacccacccctcttccacacctcataatgttatttattttttttctctttagtgggcagttttatctggcaatagcaactcaattttatggcaactgaaaggcaggaaaagtccttatttactgaaataaaatagaagacttttgcagggactcctggtcaaccactgtgcttatgactggagagattattttgatatgatggaaggaattatcctgatttcagcactaccatctctggtttcactttgcttccagcagaagcaagagacaatagtaattgtgggtagcacttcagtctgggcagactgtgcttagttaacatcatttctgtggtcttcagtttccctttagtataatgtgagtgttgaactgaaatctcaatcactggcttctaatttggttatatatttcctatctccctaatattttaaaggatcgaagagaattatgcatgttaacatagtaattaagataccttcttataggctgggtggggtagctcacacctgtaataccagaactttgggaggccgaggtgggtggatcacgaggtcagaagttcaagaccagcctggctaagttggtgaaaccccatctctactaaaaatacaaaaattagcggggtgcggtggcaggcacttgtaatcccagctgctcgggaggccgaggcaggagaatcgcttgaacccagtgggcagaggttgcagtgagccaagatcatgccactgcactccagcctgggtgacagagtgagactctgtctcaaaacaaaaaccttcttataattcctgtaagagcttggtaactggtagcctcctgagttgagtgctgtagggtttgaggggcaggaagagatgagttttttagtggactgatacatgagcaaaacaagattgcatgtgaaatttatactcagtgaggcatccgggcttaactcacatgctcctagtgggtatatgcactaatactacgtttgttgatacagtcttttgaaagagttgatgataagcatttcataaagtatttataaaacactggtatagcttagtgttggagagcagaagagagaattgcttgggattgtcaatgatttcttatcatctgctagaggaagactaaataacaacatcatgatgttaaggtagatctaaatgtgttaacaagaagaaaagttgaggaagtcctaagtggaaaagagaaagatgtaaattatgtagtatcatactacttacagtttttaaaaagatacatatgtttaccccaagcacattccttttttttttttttgagacagagtcttgctctgtcacccaggatggtgtgcagtggcgcggtcttggctcactgcaacctccgcctcccgggttcaagcggttctcctgccacctcagactcccaagtagctggtattacaggcacccaccactatgccggctaattttttgtatttttagtagagacggggtttctccatgatggcctggctagtctcgaactcctgacctcaagtgattcacctgcctcggcctcccacagtgctgggattacaggcgtgagccaccacacccatcctcacattactttcatgatggttatcttctaagatttccattataaaatacagagtgtggtgagcattcttgtacatacatcttacatacttgtgcaaatatatatgtaggttaaattctaagatgtggaattgcaaagtttgtaaagtgtgtagttttcatttgataaacttaaaaaatcaatatcaaaattaaagtcataattttatattgataaggccctggtgaatttataaaatcaaacttatttttctaggtcctaggcctacttacaagcctccagtctcaaattatccaggttggttaactctttatcctactgatattgttaagaatttatttatttatttttattatactttaagctctagggtatgtgtgcacagcgtgcaggtttgttacataggtatacgtgtgccatgttggtttgctgcacccatcaactcatcatttatattaggtatttctcctaatgctatccctcccccagcccctaacccctgacaggccccagtgtgtgatgttccccaccctgtgtccatgtgttctcgttgttcaactcctacctatgagtgagaacatgcggtgtttggttttctgtccttgtgatagtttgattagaatgatggtttccagcttcatccatgtccctgcaaaggacacgaactcatccttttttatggctgcatagtattccatggtgtatatgtgccacattttcttaatccagtctatcattgatggacattcgggttggttccaagtctttgctattgtgaatagtgccacaataaacatacgtgtgcatgtgtctttatagtagcatgatttataatcctttgggtatatacccagtaagggattactgggtcaaatggtatttctagttgtagatccttcaggaatcaccacactgtcttccacaatggttgaactaatttacagtcccaccaacagtgtaaaagtgttcctgtttctccacatcctctccagcatctgttgttcctgactttttaataatcgccaatctaactggcgtgagtggtatctcattgtggttttgatttgcatttctctgatgaccagtgatgatgagcattttttcatatgtctgttggctgtataaatgtcttcttttgagaagtgtctgttcatatcctttgcccactttttgatggtggtgtttttttcttgtaaatttatttaagttctttgtagattctggatattagccctttgtcagatgggcagattgcaaagattttctcccattctgtacgttgcctgttcactctgatgatagtttcttttgctgtgcagaagctctttagtttcattagatcccatttgtctattttggcttttgttgccattgcttttggtgttttagttatgaagtatttgcccgtgcctatgtcctgaatggtattgcctaggttttcttgttgggtttttatggtgttaggtcttacatttaagtcttcaatccatcttgagttaatttttgtataaggtgtgaggaagggatccagtttcagctttctacatacggctagtcagttttcccagcaccgtttattaaatagggaatcccttccccatttcttgtttttgtcaggtttgtcaaagatcagatggttgtagatgtgagttgttatttctaaggcctctattctgttccattgatctatatatctgttttggtaccagtaccatgctgttttggtcactgtagccttgtagtatagtttgaagtcaggtagcttgatgtctccagctttgttctttttgcttagggttgtcttggctatatggactcttttttggttccatatgaactttaaagtagttttttccaattctgtgaagaaattcagtggtagcttgatgtggatagcattgaatctataaattaccttgggtagtatggccattttcccaatattgattcttcctatccatgagcatggaatgttcttccatttgtttgtgtactcttttatttcgttgagcagtggtttgtagttgtctttgaagatgtccttcacatccatcccttgtaagttggattcctaggtattttattctctttgtagcaattgtgaatgggaattcactcattatttggctctctgtttgtctattattggtgtataggaatgcttgtgatttttgcacattgattttgtatcctgagacttcgctgaagttgtttatcagcttgtggagattttgggctgagacgatggggttttctaaatatgcaatcatgtcatctgcaaacagagacaatttgacttcctcttttcctaattgaataccctttatttctttttcttgcctgatcaccctggccagaacttccaacactacgttgaataggagtggtgagagagggcatccttgtcttgtgccggtttccaaagggaatgtccagtttttgcccattcggtatgatattggctgtgggtttgtcttaaatagctcttattattttgagatatattccatcaatacctagtttattgagagtttttagcatgaagggctgttgaattttgtcaaaggccttttctgcatctattgaaatagtcatgtggtttttgttgttagttctgtttttgtgatggattatgtttattgatttgttaatgttgaaccagccttgtatcccagggatgaagccaacttgattgtggtggataagctttttgatgtgctgctggattcagtttgccagtattttgttgaggatttttgcatcgatgttcatcagggatattggcctaaaattatctctttttgttgcacctctaccaggctttggtatcaggatgatgctagcttcctaaaatgaattagggaggattccctctttttctgttgattgaaatagtttcaaaggaatggtaccagctcctctttgtagatctggttgaattcggctgtgaatccatctggtcctggactttttttggttggtaggctattaattattgcctcaatttcagaacctgttattggtctattcagaggttcaacctttcctggtttagtcttgggagggtgtatgtgtccaggaatttatctattgcttctagattttctagcttatttgtgtagaggtgtttatagtattctctgatggtagtttgtatttctgtggggtcagtggtgatatcccctttatcattttttattgcgtctatttgattattctctctttacttctttattagtcttgctagcggtcatttttgttgatcttttcaaaaaaccagctcctggaatcattgagtttttgaagggttttttatatctttacctccttcagttctgctctgatcttagttatttcttgccttctgctagcttttgaatttgtttgctcttgtttctctagttcttttaatggtgatgttagggtgttgattttagatctttcctgctttctcttgtgggcatttagtgctataaatttccctctacacactgctttaaatgtttcccagagattctggtacgttgtatctttgttctcgttggttttaaagaacaactttatttcagtcttcatttcattatttacccagtagtcattcaagagcaggttgttcagtttccatgtatttgtgtggttttgagtgaatttattaatcctgatttgcactgtggtctgagagacagtttgttgtgatttctgttcttttacatttgctgaggagtgttttctaccaattatgtggtcaattttagaataagtgcgatgtggtgctgagaagaatgtatattctattcatttggggtgtagagttctgtagatgattagtaggtctgcttggtccagagctagttcaagtcctggatatccttgttaactttctgtctcattgatctgtccaatattgacagtggggtgttaaaggctgccattattattgtgtgggagtctatgtctctttgtaggtctctaaggccttggctttatgaatctgggtgctcctgtattgggtgcatatatatttaggatagttagctcttcttggtgaattgatccctttaccattatgtagtggccttctttgtctcttttgatctttgttggtttaatgtctgttttatcagaaactagaattgcaaccccttttttttttgctttccatttgcttggtagatcttcctctgtccctttattttgagcctatgtgcatctttgcatgtgagataggtctcctgaatatagcacaccgatgggtcttgactctttatccaatttgccagtctgtgttttttaattggggcatttagcccattttcatttaaggctaatagtgttatgtttgaatttgatcctgtcattatgatgttagctggttattttgcccgttaactgatgcagtttcttcatagcatcgatggtctttaccatttggtatgtttttgcagtggctggtaccggttgttcctttccatgtttagtgcttccttcaggagctcttgtaaggcaggcctggtggcgacaaaatctgtcagcatttgcttgtctataaactattttatttcttcttcacttacaaagcttagtttggctggatatgagattctgggttgaaaattattttctttaagaatgttgaatattggcccccattcttttaaggctcgtagggtttctgctgagacatccgctgatagttggataggcttccctttgtgggtaacctgacctttctctctggctgcccttaacatttttttccttcgtttcaaccttggtgaatctgacgattatgtgtcttggggttgcacttttcaaggagtatttttgtggtgttctctgtatttcctgaatttgaatgttggcctgtcttgctagtttagggaagtcctcgtggacaatatcctgaagagtgttttctaacttgattccattctccccgtcactttcaggtacaccaatcaaacgtagatttggtgttttcacatagtcccatatttcttggaggctttgtttgtttcttttcacttttttctctaatcttgtcttctttttttcattaatctgatattcaatcactgatatagtttctttccacttgatcgaatcagctattgaagcttgtgcatgcgtcacgaagttcttgtgccgtggttttcagctccatcatgtcatttaaggtcttctctacactgtttattctagttagccattcatctaatcttttttcaaggtttttaccttcctcgagatgggttagaacatcttagcttggagaagtttgttattactgaccttctgaaacctacttctgttaactcatcaaactcattctctgtccagttttgttcccttgctggcaaggagctgtgatcctttggaggagaagaggcagtctgttttttggaattttcagcttttctgctctggtttctcccatctttgtggttttatctaccttttgtctttgatggggttttggtgtggatgtcctttttgttgatgttgatgctattcctttctgtttgtgtgttttccttccaacagtcagacccctcagctgcaggtgtgttggagtttgctggaggtccactccagaccctgttttcctgagtatcaccagcagaggctgcagaaccacaaatattgctgcctgatccttcctctggaagcttcgtcccaggtggggcacccaccacctgtttgaggtgtttgtcggccgctactgggaggtctttcccagtcaggctacatgggtgtcagggacccacttgaggaggcagtctgtccagtgtcgaagctcgaatgccatgttcagagcaccactgctctcttcagagctgtcagacagggacgtttaagtctgcagaagctgctgcgttttgttctactatgccctgcccccagaggtggaatctatagaggcagtagcccttactgagctgcggtgggctcctccagtttgtgcttccagttctctttgtttacactgtgagctactcaagcctcagcaatggcagacattcctcccctcatcaggctgcagtgtcgcaggtcaatctcagactgctgcgctagcagtgagcaaggttctgtgagcgtgggacctgccaagccatgcacaggagggtatctcctggtctgctggttgttaagactgtgggaaaagtgcagtatttggtcaggagtgtactgtttctccaggtacagtctgtcacggcttcccttggctaggaaagggaaatcccccaagtccttgcgcttccgggtgaggtgatgccccgccctccgtgggctgcactcactgtccagccagtcccagtgagatgaaccaggtatctcagttggaaatgcagaaatcacctgtcttctgcatctatctcgctggagctgcacaccagagctgttcctattcagccatcttggacaagatttttttttacttaaaatttttttaaattaaaaacttaagacatatctaaaaaaatgttaagaatttttaaatgatgggtgaaaaataacatcttgttttaatttgcatttcttggttcttggtttttagttgtttttgtttttgcttttttgagaccgggtctcactctgttgcccaggctggagtgcagtggtgcaaccacggcacactgcagcctcaacctcctgggctcaggtgattctcccacctcagcctcccaggtagctggaactacaggcacctgccaccacacccagctatttttttgtgtgtgaattttttgtagagacagggttttgccatgttggcaagtcttttctccaactcctgggcttaagcgatcctcctgcctcagcttcccaaagtgctaggattacaggtgtgacccaccatgcccggccaatttacatttctttaattatcagtgaatctgaactttttttgatctacatttatttattcatgtgctttgtctatttttctgttaggtttctaaaatatttttcttagtgatttttgagagctcattatgaattaaagcccttttaatatgaagtgaacagttttttccaggttcttttgttttgtcagttttaagcttgttatactactggatatagattactttttataacttttaattacatgagtagtgtatgaatatacttttgtagaatttcaaacattacaaaagtatatagagtaaaagattagttttatttttaactcattacccaagttaatcactgttaatagtttagggtttctttttaaatctatttttgtacatcaacatctttttttaaaaagttttattttagatttgggggtacaggtgaaggtttgttacataagtaaacgtgtcacagggatttgttgtacataactatttcatcacccaggtattaagcctagtacccaatagttaccttttctgctcttcttcctactcccaccctccccggtcaagtataccccagtgtctgttgtttccttctttgtgttcattagttcttaccatttagcccccacttataagtgagaacatgcggtatttgggacgttcctgctgaagacatgcgctcgttcttttttatggctacgtagtattccacggtgtatatgtaccacattttctttatccagtctgtcattgatgggcatttaggttgattccttgtctttgctattgtgagcagtgctgcagtgaacattcatgtgcatatatctttatggcagaatgatttatatttctctgggtatatacccagtaatgggattgctgggttgaatggtagttctgcttttaggtctttgaggaatcgccatactgcttcccacaatggtggaactaaattacactcccacgaacagcatataagtgttcccttttctctacaacctcaccagcatctattattttttgactttttaataatagccattctgactggtgtgaaatggtatctcactgccgttttgatttgcatttctctaatgatcagtgatactgagcttttcttctgtatgttttttggccacatatatgtcttcttttgaaaagtgtctgttcacgtgctttgcccactttttaatggagttgtttttctcttgtaaatttttttaagttcctataaatgctaaatattaggcctttgtcagatgcatagtttgcaaaaatgttctcccattctgtaagttgtctgtttactctgttgatagcttcttttgctgtgcagaagctcttcaatttacttcaatcgtacttgtcaatttttgcttgtgttgcgattgtttttgatgtctttgtcatgaaatctttgtctgttattatgtccagagtgatattgcctaggttgtcttccagggtttttatagttttgggttttacatgcaaatctttaatccatcttgagttgatttttgtgtatggtgtaaggaagggatccagtttcaatcttctgcatatggctagccagttatcccagcaccatttatttaatagggaatctttttcccattgcttgtttttgtcagttctgtggaagatcagatggtcatagatgtgcagccttatttctaggctctctattctgttccattggtgtatatgcctgtttttgtaccagtaccatgctgttttggttagcgtagccttgtagtagagtttgaagtcaggtaatgtgatgcctccagctttgttctttttgcgtaagattttcttgactattcaggctctttttggctccatatgaattttaaaatagttttttctagttctgtgaagaatgtcgttggtagtttgataggaatagcattgaatctgtaaatagctttgggcagtatagccattttaatgatattgattcttccatccatgagcatgggatgtttttccatttgtttgtgtcttctctgatttctttgagctgtgttttataattctcattgcagagatgtttcacctccctggttagctgtattcctaggtattttattctttttgtagtaattttgactgggattgcctctctgatttgactctcagtttggctgttgttggtgtataggaatgctagtgatttttgtatattgattttgtatcctgcaactttggtgaagttgtttatcatctggagcagcttttaggccaagactatggggttttctaaatatagaatcatgttgtctgtggacagagatagtttgacttcctctcttcctatttggatgccctctgtttctttctcttatctgattgctttgcctaggaccatcaacatacttttatgtgtaattatacatgtagtttggtgttttctcttttcttaaaaatgatattatgctgtacatatttttctgcaactttttccacttacactcttagattgtagttgtgtttagatttattctcatactttctaatgatgacttaagtatataccataccttatttaactattctcctatcagaggtcatttatatgttcagacgttttatattaataggtagttggatgtattgatcttttccctaatggctatgactttggtgtctttcttactaaaactttaggtcttctgtatgctgaaattgtatgaagatttcaaccatgtgttctgactttggtctttgcacttaaatcattagtaaatctgaaatttattctggtgtatataatgagatatatggttccacctcgccccaccccagcaaccaccatccaatagctaaatagcaccattttttgaataagttgtcttctccccaactgatttgaaatgtcaatttgtatcatacattgcattcataggtgttccatcctcttttctcctttgaactttgtccattcttctattcttgcagcaaaagcaagtctttttttttttttttttttttttttttttttttactgtagtactatatgttttaataactgccgggaacacttccttttcagaaatttctaaggaactctatgttattttttccaaataaactttttatcttatcattttgaccattttaagtttacaattcagtggcattcagtacactgacattgttatgtaaccatcagtaccatccatctctagaatattataatcatcccacactgaatctctactcattaaacagtaactctccattcctccctatccccatcacctgatgataaccactatctactttttgtctcatgaatttgcctattctaggtaaatttatataattataataagtggagtccacttatatggcatcccactatttgtccttttgtgtgtggcttattttacttagcataatgtttttaaggttcatctagatctatcttgtgacatgaatcagaacttcattcctttttatggctgaataatagttcgttatatgtatatactatatttcatttattcattcatctgttgctagacacttgggttggtttgtttttaccttttggctattttgagtaatgctgttataaacataggtgtacacatatctgtttgagttcccgtattcagttcttttaggtatatacctgggagtagaattgctagatcataagggaattctatttttaatattttgaggaactggcatactgtattccacagtggctgcaccattttacattcccaccagcagtgggaacctttaacaaaggttccaatttttccacatctccaccaacacttattaaattgtttttttagtaatagccaagtgtcttagtctgttttgtatgtgataacagaataccacagactgagtaacttataatgaacagaaatttatttcttagagttctggaggctgagaagtctaatatcaaggcatgggcatctgtgagggccctcttgctttgtcataatatgatggaaggcatcacatggtggaaaggaaaagagacggtgagagagagagtaagagggacaaaaccatgccctaaataacaaacacacccctgcaataacgacattagtccattcatgaggacagagccataatgacccaaacacctcttaaaggcgccaccccaataacattacattgacaattaaatttcatcatgagttttgaaggggacattcaaaccatagaccgtcctaatagatatgaagtagatatgcatactagatatgcatttccctaaaaattagaaatgtgttgagaatcttttcatgtgcttattggtcatttgtatatcttctttagagaaacatctttttaagtcttttgcccattttcaagttgggttgacatttgttactgagttttaagagttatttatatgttctggatattacttccttatcaaatatatgatttacaaatatttcctctcattctgtgggttgccttttcactctgttgatagtgtcatttgatgcacaaaatttgcttttaattgatgaaatataatttttttcttgtcttgcctgggcttttagagtcacatccaataaatcatagccagatcaaatgtcaagaagcatttcctctgttttcttctgagagttttatagttttacctcttatgtttaggtctctgatctattttgagtttgtgtttgtatatgataagggtccagcttcactttttttgcatgtggatatccagttttaccagcaccatttgtagaagagactccctttccccatttgactgttccttgtcacgcttgttgaaaaccgtttgaccatatatgcaggggtttatttccgaggtctctgttctattccattggtctgtatgtctgcctttttgtcattaccattgttttgattattatagttttggaatcagaaagtgtgagccttctcaactttgctctttgtttctaggattgttttggctatttgtggtcccttgagatttcatatgtattttggaatggatttttctatttcagaaaaaaaaaaccaaaaaataccatcatcaggattttcataggggttgcactgaatctgaagattgctttgtatagtattgacagtttaaaaatactaaatttttccaatccataaacacaagtgtctttccatttattttatatctttaattttttttagcagttttgtagttttcagtgtacaagtctttcacctccttagtttattcctaagtattttattctttttgatgctattacaaatgatattgttttcttaatttccttttcagattattcattgttagtgtatagaaatacaactgagttttgtatgttgattttgtaacctgccacttaactgaattcatttattagttctaagagatttttgcatgtgtgtgtatatgtgggatccttagggttttctaaataaaagatcatgtcatctgcaaacagagcgaattttatttcttcctttctaatttgaatttctttttcttacctaattgctctgattagaactttcagtcctatgtcagatagaagtggcaaacatggacaccctgtcttgttcctgatcttagggaaaaagccttcattcatttaacattgagtatgatgttagctgtgggtttttaatatatggcctttattatgttgaggaagtttccttccatttcaggtcaactctaaagcatttatttttattaatccctcttttttttttttttttttttttttttgagacagagtctcgctgtgttgccagactggagtgcagtggctgtatctcggctcactgcaacctccgcctcccgggttcaagcgattctcctgcctcagcctcccaagtagctgggattacaggcacgcactaccacacccagctaatttttgttttttttttttttagtagagacggggtgtcaccatgttggccaggatggtctcgaactcctgacctcgtgatccgcctgcctcggcctcccaaagtgctgggattacaggcgtgagccactgtgcccggctaatccctctatcttttaattttaattagaatcacattggatttatagactaattttgagaaaatagtacagataaatttgcatgttgaaccacagaatgttgtcacagaaaatgtgagtggggaggaagaagaaagattatgacattaaatgtaagtttataaatttttatgatactactttgagaaacattaatatagtttataaggaaaattatattttaagggattttctacaaaggtgaaaaaaaatcaccctatgagtttaaaggattttaagctttatatttaattctttccttcttttattaatttaatctatatttcttcttttttcctaggatatcctaaacctgaggaaggaatacttgacagtttgggttggtatagctatcatgacaaatataagtggtagtatgtgtagaaacgtgtaggtaattagtttttatgaggtgcccaaacataggatccttggtagggtaagataactttcttaaatgctgtgtttgtatgtaggttaaaatatataaaacacaattttctttccacattatattgttattttgtgatggtaatctgtcgataaattttctttctattcatatcttatatacatgaaccttaaagcaatctaagttgggtttattttttctgtaacacgctgatttaacacacttgatgtaggcttacgcagtttacacaatgcatgttaaaaaaaaagatgaagtgcagttgtgatataggccaatgaaaaataaagatttcttaataagtaaaaacaaaaatctattacctttcatttcttagactagtttggtaatggttaatcattttatataatgcaccttaggcttgttttttagtatttgccttacctccaaaatctgtggtccaagtaaatctgttgccatcttaaactgttaaacacttgataactgtttatgagatgagaagagcagagttgaacatagcactttatgctttgacttatagcaatttaataaaagtaatggcagtttagaagcaaaggtactagggacagaaacagttctaaaaattaagattttataggattattttgtgttctctagatagtcaaaaatgtattctcaaatttctctgtatattttttatccatgtgccctggtgtttcatttattatgggaatcctattggtatttaggactatgtcttaattttggggcagggcagagtatggaagtagagaggatgggaaggggattgataagataaagtattgtttgtgaagactttgtaaataccatctgggcaatagaataatagaaatttatttatgactcactctacagatcacttttggaggaaaaaatacaaattaaatgtctaccaaaataagaaatgacagaatgactgttgaactaaaccaactctcatgggataatacttttcaaaaatcattttcctttactatagtgaattctaattactctaataactttaccgctaaataacctgatgtggtagctatagagaaaaacagtgaaaaatgaggttcccattaagagtttcacaagtggaacccttaacctggaaactggttagaagggttctatgatcaaaatgacctggatgccctagcagtcatgctaaaactatataaaaaatttttttttcctctgtagtcttgtattagtccattctcaatgctgttgtaaggaacagtctgagaccgggtaatttataaaggaaagagatttaactgactcagttctgcagggctgaggaggccccaggaaacttataatcatggaggaaggggaagcaaacacattcttcttcacatgatggcaggaaggagaagtatgagaaccaagtgaaggaggaagccgcttataaaaccatcagatctcgtgagaacttactatcatgagaatagcatgggggaaactgcctccatgattcaattacctctcatggggtccctcccacaacacgtggggattatgggaattgcgattcaagatgagatttgggtggggacacagccaaaccatatcaagtgtttagatgatctgattgaaataaatgctatctggagatccatgtgttcaacatcttggaactgttttctttctcagatgtttgggtcattgctgtgattgttattgccataggtaagtatcacaaattttgacaccacttaagtcaaaaaattattgtgaagacatgcattttaaaaatagtttttcagtttctatagttttttcagcttgtaaattggttaaaccgatttaggaaaacctgactttttatttgatatacttaactacctaccttgtgttagtgattttatactctgttatattctgtatatctacttagtaacaaagcctaagtaatacatattttctcaagatgatcagtaatattagttggcttcccaaatgtgcttttgatagttttctaaattaagcaaggacttttctctgacttactatggactgtgtaagtgattatggggagttggatttagatagcaaagagtctggatggaatataaatgtgtaggtgcttaaataacatttgaccactgaaatgtaaccaacatttatttcttctgctagatgttgaatcttggtgattagttttcagaattatatgtcatttgtttcctggtttcttatagttgttggagttgcagtaatttgtgttgtcccgtacagatatcttcaaaggaggaagaagaaagggtaaattaaagcatgtttcttttaacttcttggtccttcttatacttaacatgcttttgtgcagcttcagtttgtaatctgtattgcatgctatctttttttttttaaaaaaaaatgcctgcattagtttgtcctaccaattgcatttctttgctaaaaatattttcagctacttctaacatcactgcaacataaaaacatctgtgcagagttcctacagctattatgactttaagaaaaatttcttttggatttgaggtttaagttatttagcaaatcatggaccactcactatgaggccttctctaccctattccctatttccaaaattgcactaatggccaaaattaaatttaaagtatttcactgtggagactttgacagttgtattcactggaatttttataatgaaagtttccacttgtctatatagcttagctagttgcaagaagctatgtaggcatatcatttaaatacccaatttggtgtcttttcatttaaagttgttatttatacatgttaaactgggggattcaaaacaacactatccgatttccctcttatgttctctgaatttaccagattgcagtaaaactgatagggttaaagttaaaattgctgagaggggttagatctgtaaggtacctcaattaactgtgtcttttaatatataaaaatgtaaaaagtgagtgggtttagaatagaagaaaaatgtacaagtacatatcttctaaagaaaatagggttttaaaacatcaaactcaaattttagttaaagagcttacagtttaacaaaagacttagaatgaatcctggaacacagactaagattaggtgctttgaaatttctgaaagataatatacattcatttttactgatttttaaaaactgttttcccctatagttttagaaatagctttgaaatcaaacctaataattttaagacttttggtactcatggttttatgatatatattccttttatactgatcatcaggtttgggctaagtcataaaagtacaagctttactcataaggaactcaaacttttttcatattacttggttatcttttgaaatacccataatcccttcacttgaatcttaaatcttgtattaatggaacacgatatgcatatttgatttatctatcagttgtatattctaaaagttacatatctacaacgtgagtacaaaatattatcaatggaatatttttacaaatccataaggtttgcgtagaaacaagttctaaagaaaacaaaacaaagtcgcattctgcttattttccttctttgtttaaaatatcactgcatcagaatttttaaaggttcattaacaagtattaatcaaactctctctagctagcagttaatggtttttctgttgttgttttttgcttttttgtgatggagtcttgctctgtcacccaggctggagtgcaatggcgcaatcttggctcgctgcaaccttggcctcctgggttcaagggattctctgcctcagcctcacgagtagctgggattacagtcgtgcaccaccaccaccggctaatttgttgtacctgtactagagatggggtttcaccatgttggtcaggctggtcttgaactcctgacctcaggtaatccgcccacctcggcctcccaaggtgctaggattacaggcatgagccaccgcgcccggccttaatgggtcttttaaagctcaacagttatctgactgttacactcccaaatgaaaggttcaatagcagtagtgaactgagattccaaaattaatttgtccagtgatttttttttaaagcccatattttacagcatagggtccaactgacagttgccattattaaaattttaaaatattttgggaaggtatgatatctttagccaatgcaacataattaatcctgcaaatagtagcacaacttgaggaaaaatagtccagaaaatggtgtgagagacgaaactcctaattgcctttgaactttaaaatataaactgcgtgggaatcttttagaatagatgttaccctttttatgacaggaacatactcgattggaaattcagcatatgtaatggctgaatccaaagctaggctctctttatggatctattattttgtagttccatgttattttgatagctgaactgaatgtgagggtggtttatctttcttcttcagagtctagaggaatgtttctctgactttaatgtgcacattagtcacctggaaatctgttaaagtacagattctgattcattgggtttggggtggagcctgagaccctgcctgtctagtgagctcccagtgctgatgctgctgctgtgcctgggctacactgaccagggtgttgcccactactgatgtgcctatattgttgaagtctgaagaaacactatgaagcttattggcaaatttttctaatatttaagataattgaagtttttaagattcctcatccatgtgtatccttaaaaaaaggctatggggtaataaatagtacttggcttttcttaccttctttaactcttaaaaaacaaagatttccagccgggcctggtggctcacgcctgtaatcccagcactttgggaggccgaggcgggcagatcacgaggtcaggagatcaagaccatcctggctaacacggtgaaaccccgtctctactaaaaatacaaaaaaaaaaaaaaaaaaatagtggcgggcgcctgtagtcccagctactctgggaggctgaggcaggagaatggcgtgaaccccggaggcggagcttgcagtgagcgagattgcgccactgcactccagcctgggtgacggagtgagactccatctcaaaaacaaaaaacacaaaaaaaccccaaagatttccattattttctttgcactgtttaatgtccataatcttgtccccccagattggctgttgtggccttagaaacttcttataaagactataaaatgtctggaggcacttctccacttccgggggtaactggaagcaggctagcaggcacaaataatctcaaattgttgttaaagcctggcacaaaatgtatttcttgtaaactggtatttatggtgatttgggaacgtaattactcttctgcagccttcatctcaaaatacaaaaatagtgtaaggagtcattttaagatcatccaacatcatttacattacttgataaaaagtgggcaaaaggttaaagtattctgccacttttctgtttcatagctctcagctgagaacagtataggataccagtgggtccgaaacaggtcccatccacatgctccctccttttcccttcccatttcctttctttactaattcttctaccatactttttagtcttggaagccacagccctgtctttgctactgcttcagtcctgtattgcatggcatgactgtgcttctgaacaacagatgccttttgtttacataaatatttaagtaatggttttttttaaatgcatgattattttttaactctagttaagcatccctggataagtgacagtttggctaagttagtgaaagttatttacataatttatatatttattacctgtgacaaatagtttttccttttttccattaatggtatttattattttgtataacctaaactgacttttaatgttacattaatattgactgacccaattactttattaaaaatagtggtcagttcaggtaattggggcatatagtgacatggggcaaaaaaaggatcaaattaacttaaatgtttttctagttggcccttaaattcttgagcatttaacccttcaaaaatttttgagcaactacaaaaatgttttgtaattagtttagaaagcatccttacaaaattagatccatctcagaaatatgagacgccatgtaatacaaagttttgcaacgatgtctcctcaggttgaaaacagatgtgccacaggaagacacttcttaatgtaaaagtccagagacatctgaaaatacatgatgtcataaagttgatttctagataatattacatggatttgatacatactcaatgtattccctcaaaattgagggtgttaggccgggtttggtggctcacgcctgtaatcccagcaactttgtgaggccgaggcaggccgatggcttgagctcaggagtttgagatcagcctgggcaacatagtgagatgctgtgtcttgaaaaaaaaaaaaaaaaaaaaaaaaaaaatcaagagtgctagagaccggtaccatttctccccaacaatctgttattccttgaaaacattttgacatgaatcacttcatgcaaaatggcttcaaagataaacatattaaacaggaatttccagtctgtttatctgctggatgatctatatgacttcaaagttcaagtagcttctagcacaaaattcatgtttccagtccttcagtgagaatgagaaagtcttaagttatgaacctaattctcagctttcctgctactctcttacactggattttatcccacttgttatgctactcgtttctttttggtttgaagtcactattttattcagccgttttctcttcctctgttcagcacatacctaactgatgagacccacagagaagtaaaatttacttctctctgagaaggagagatgagagaaaggtttgcttttatcattaaaaggtatctgttttctgttgtttattttcagatgtcctttcttttgaaaaatattcagtggatatatagatatcaataacctgagcaaagagatattggcagtaaatatcaaagaggaaatttacattcctgttccctttgctaaattattgatgtgttcttataccattccctttgaaaacataatgtgtactgacaggctttgacgtaggctttaaatagagttatgttcccctagtccttttatcagacgatctcacttctaccttgtaaaacagctgtgaatccaaaagtaagaatttgtgagccaactgggaaataaccacagaatcaactcattttaagtgcaaggaggaaaaatgcccttttatagaaaccaaaatatattttacttagttttgtaaatttattcaattccaacgtataaataactctgtaaagacattttatcagtttccctgggctgggatatttttagcatatcaaaggaaaacaaaaaagtcctcagattttgaaaagtaatggattgcattgccttaaacccttggaccctgtccaccttctgtctttgaactgaactggaattattcctctgtttgtgctagaatgtgtgtccgcagagctgggaagagatggagatacatatcccacctcttataatgtgaggccctaacctaggttataattaaaagtttgggagcaggatctacaaaggccagctggaaggacaatttcttagtaaaagcaaagtgatgtctttggttacaggaggaaagggaaagacaaaacataccaaccagaattggcggtctgggcctacccagtcctatatacagtagttccttcttatccacgggggatacattccaaaacctctagtggttgcctgaaacctgggagagtactaaaccttatatatactgttttctcttaagcatgtatacctatgatcattcaatttataaattaggcacagtaggagattaacagcaataactaataactaataatatcaattataaaaatatgccagcatcactactcttgtgctctgaggccactaagtaaaataagggttacctaaccacaggtactgtgataccgtgacagtcaatctgataaccaagacagctattgagtaacaggcacatagtgtccacagcatgggtatgctggacgaagggatgatttatatcccgggagggatggagtgggacagtgtgagatttcatcatgatactcagaatggcacacaatctaaaacgtagttctgtaattttccatttaatatttttgaccgtatttgactatgggtaactgaaaccgtgcaaagtgaaaccgtggataagggaagcctactatatcttcttagtctcttaggacacttttgagactaaagccaactaggaaaatagtttttagactctctctgagcttcagggtatctgtaaacatttgaagataatttaatgaatgctgtagttaatattttgccatcttcaaaatagcttcattgttatatccaataaatgtttctttaaatttatgttaatgccttttatctttggcatagattggatttttatttaaaactttatttaaagaaagagattctactactatgggaaaaaaatatttacttagaaaaatatagtggtggccagtcctggtggctcacacctataatcccagcactttgggaggccgaggcgggcggatcacttaaggtttgagaccaggttggccaaaatggtgaaaccctgtttctactaaaaatacaaacattagctgggcatggtggtgcacacctgtaatcctagctactcaggaggctgaggcacaagaattgcttgaacctgggaggaggaggttgcaagtgagccaagatcacaccacactgcactccagcctgggtgacagagcaagactctgtctcaaaggaaaaaaaataaagaaaagaaaagaaaaatatagtggtcttggagaattcagtgacaggccaaaccattaagtctgtcatcacaacagtccttagggaactgcaatattataagtatagtaatgacgcagtagagaaccataatgatggcctccccggcaaagaagaaccaacccgtttacgcctgaggttgcaattttttgaatttttgcagtcagaccctggcgatgaccttgagcagtaggagataaattccacatgcttagcgttccagtaatggaacactaggcataaatgggttattaaagtatccagaattaacatgcttagctgtgacattggaaaggcaatgtgtttgctgtggcacacatactagtaaataatgactggtccgaatttggttttcgtttgtctattaaagtcaatttactaaggcagggagggcccagagctgtgctgtccagttcaatagccatgcgtgactgctaaggacttccaaagtggctagtccaatgtcaggtatgctgcaagtgtcaaacacacactggatttcaaagactaagccaaaaaaatgtaaaatacatctcaatattttggttatactcggttaaagaaaataaaattatttttgcctttttatgtttttaaaagtggcttctggaaaattttaaattacatgtatgactggcatcatctgtctttggccagcactagactagaataataggttttataaagatgtctattgttatactaaaagtgtgacgtaaactttagttatttaggagactcttagtggaatacatgattttcttgacagtgaggggtagatgaggcatcacatacttgaacagttagaaccactatctttttaaaggttctgtgccagagctacagctttaaaatggagggatcaggaaagcatgcgtttgtctccagtctttcccattggccctacatcaaaatgaggacatagttactaagtactttgtgtgctactgctctatttcttgttttggaggggatcaaaaatataagacagggataaaggaaggttttttttacagtgagaccagttgaacatttgaaattattttaaaagaataatttatttcccaggttggtggctcattactatatttttttaattgttcattttctgaataggcttctggaatttaatttctgtacttaattatatttatctttgacatgatctttataccttggtttgcaggaaagcagatggtggagctgaatatgccacttaccagactaaatcaaccactccagcagagcagagaggctgaatagattccacaacctggtttgccagttcatcttttgactctattaaaatcttcaatagttgttattctgtagtttcactctcatgagtgcaactgtggcttagctaatattgcaatgtggcttgaatgtaggtagcatcctttgatgcttctttgaaacttgtatgaatttgggtatgaacagattgcctgctttcccttaaataacacttagatttattggaccagtcagcacagcatgcctggttgtattaaagcagggatatgctgtattttataaaattggcaaaattagagaaatatagttcacaatgaaattatattttctttgtaaagaaagtggcttgaaatcttttttgttcaaagattaatgccaactcttaagattattctttcaccaactatagaatgtattttatatatcgttcattgtaaaaagcccttaaaaatatgtgtatactactttggctcttgtgcataaaaacaagaacactgaaaattgggaatatgcacaaacttggcttctttaaccaagaatattattggaaaattctctaaaagttaatagggtaaattctctattttttgtaatgtgttcggtgatttcagaaagctagaaagtgtatgtgtggcatttgttttcactttttaaaacatccctaactgatcgaatatatcagtaatttcagaatcagatgcatcctttcataagaagtgagaggactctgacagccataacaggagtgccacttcatggtgcgaagtgaacactgtagtcttgttgttttcccaaagagaactccgtatgttctcttaggttgagtaacccactctgaattctggttacatgtgtttttctctccctccttaaataaagagaggggttaaacatgccctctaaaagtaggtggttttgaagagaataaattcatcagataacctcaagtcacatgagaatcttagtccatttacattgccttggctagtaaaagccatctatgtatatgtcttacctcatctcctaaaaggcagagtacaaagtaagccatgtatctcaggaaggtaacttcattttgtctatttgctgttgattgtaccaagggatggaagaagtaaatatagctcaggtagcactttatactcaggcagatctcagccctctactgagtcccttagccaagcagtttctttcaaagaagccagcaggcgaaaagcagggactgccactgcatttcatatcacactgttaaaagttgtgttttgaaattttatgtttagttgcacaaattgggccaaagaaacattgccttgaggaagatatgattggaaaatcaagagtgtagaagaataaatactgttttactgtccaaagacatgtttatagtgctctgtaaatgttcctttcctttgtagtctctggcaagatgctttaggaagataaaagtttgaggagaacaaacaggaattctgaattaagcacagagttgaagtttatacccgtttcacatgcttttcaagaatgtcgcaattactaagaagcagataatggtgttttttagaaacctaattgaagtatattcaaccaaatactttaatgtataaaataaatattatacaatatacttgtatagcagtttctgcttcacatttgattttttcaaatttaatatttatattagagatctatatatgtataaatatgtattttgtcaaatttgttacttaaatatatagagaccagttttctctggaagtttgtttaaatgacagaagcgtatatgaattcaagaaaatttaagctgcaaaaatgtatttgctataaaatgagaagtctcactgatagaggttctttattgctcattttttaaaaaatggactcttgaaatctgttaaaataaaattgtacatttggagatgtttcatgatgatgtgtttatttctagtgggttttgtctcaaattgaagtatgtttctaattgggcccatcttctaaccattccactcccacagccattcctcctgtccctcctagctcagacccttaagtatccccaggcttctccactcccaacccatcacatagatactgcacagatatccagtgacatcacattacctactggatgaagtccacatttcttagcctgatacttgaagaccttttacaattaaatcccaactttcttccccaagcattttctattgcacttcttcaaataacctactctcagtcaagcctgaccatttcccctgtgctttctgctgtattcctagttcattgttgcttgaaacacctactgtcctgttgagatcctatgcatcttccaaggcccagctcagatattacccttcatgaaactgtgcctgatttctgcccagctcttatagtctttattattacctaaccttgggatagccacatttaagcatctatatatacgtgtccagtagaagatatatcttctgcatcctatgatcgcatatgtagagctaaataaaaacccaagtcctaacaaagtataaaatttatgtaactagtaggatttggttgtttctgcaaaaatcattgttgctctctctgcagatttgaattaagtcggattgctaaatttctcagagcaggcttcagtgtttctcaaccatggctgcacattgcaatcaccgggggatatttacagacacctgggtcccacccctagagatttctagtgtaattgatctgggatgtggtttgggtgtagggatttccaagcgtcctaaatgattccaaagtgcagctaaggttgaaaacccatgcattagtaaatctcaagccccacagtaaatttttctatataaacttgtaaagatagaagttaaaggcttatatttatagaagaaaattatggctttcttaattcagcctattaaatcagaaaatttcattgaagacttgaattaaggttttgttgtttggctaactgaacaaggctagctgttgtttagaaatacagaagcattgtctcaaataaacataaaaatacagaagcattctgtttaataaaacactaggtgaaaattatatatatatgtgtgtgtgtgtatatatatatatatatatatacacacacacacacacacacacacacacacacacacatattttgagatggagtttcgatcttgttgcccaggctggagtgcaatggcactatctcggctcaccacagcttccaccttctgggttcaagcgattctcctgactcagcctcctgagtagctgggattacaggcatgcaccaccgcgtctggctaattttgtatttttagtagagacggggtttctccatgttggtcaggctggtctcgaactcccaacctcaggtgatccgcccaccttggcctcccaaagtgctgggattacaggcatgagccaccgcacccggcctgaaaattatattgactatgaatagagcattttggaaaatcttatgtgaccttgagactgtaatgtattttttaaattgggataaaatacatggggacagttagttactttgtaaggtaactaacaataaatctgtaagaatgctgaagggacttgggattagaaggaatatgaatttgtggtgttcaagtagattttagggtttgtgggaaatagtcaactctatggtattctaaaacttagtaatgtctttcagctaacattttaaccaagaatgagcttttctgcatatttttaaattttgcatacttgtacttaagtaggatttaacatggagtctaataacttccagaaatgattcaaaattgagtgattgtacatacagattttttttttttttttcctggactacactgttttcatcagaatttctaggctcactcagaaaaggttacactagtatgactaatcctttgtaaatcggagcactgctgccctcctgtggactgtcacggcatttgacaatcccttccttaccagctcaaacctagtcactattcagaagtttgagtcattgctgtgattcccagaagacattttcaatttcatttgggatatggtataagactagtcctcttctccttccgtgaaatcaaaattattttttgacacaggatctcgctctgtcacccaggctggagctcagtggctcaatcacagcttactgcagcctcaacctcctgggttcaagggatcctcccaacttagctttccccaacagctgggactacaggtgtgcaccaccatgcctggataatttttgtattttttttttttttttttgtagagacgggctctcgcatgttgcccaagctagtctcgaactcctggcctcaagcaatctgcctgcctcagtgttccaaattactggggatccaggcatgagccactgtgcccagccaagattaacatttttaaaagagttttaaatgctgtcccttattgcttaagtataggagaagtataatattgtggatctgtggtcaataaacaatttttccttccctctcacataccagcagaacgtttgaacaaattgccaaaagtatagataacatttgaaaaagccgcccttcctgattcctgattcgatagtacatagcccagggaaacctgtacagaggtggtaaaactggtgttaggagactccacctccatttataagatttacctctctcatgtagctttttacaaaactaaactataataatatgctgcagtgtggcaaaccctgtgctaaactactgtaaacaggaacccctgtaaacagtaatcctggtgtttggggcttgtggcttcattgagagagaattcaggaacaaatgcttagagaagcacttcagaatggtgttcaggaaaattatctatcgtctgattaatctcctccacctgaaagcgttcctaggaaaaatactctgtaaatttgtatttaagttgggacttgagaattctttggttaggttcccatagcatcgtgcttctcaagtcttagtgtgctagtgagttacatggtgatcttcttaaattagaatcagaagattcaaaaggtatcggttggggcctgaggttctgcatttctaatgagtgcctaaggagctgtttgtggtgggctgtatgatggcctctaaagatatccaagtcctaatacctggaacctgtgaatgttactttatatggcaaaagggtctttacagatgagattaagaaaattgaaatagggagattatcctggattatccaggtgggggccctaaatgtaaccacaagggtccttctaagagggaggcagggggagatgtgactgtgccagaagacaacatggccactgaagcaaaagactgccccgctggcttggaagacagaggaagggggtgcaagccaaagaacgcagctctagcagctgaagaaggcaagaaaacctgttctctcccggcgcttctgagagggcgggtggcccttgcagtccagtgagctgattgcaggcttctggaatctgtaactgtacaaatgtgtgttgttttaagacaccatgtttgtggtaattttttagggcagccacaggaaactaacacaccagtgctgggggccctcagaccacagtgagtagtaaagcgttttaggaacaagaccacagaagagaggctctcaactttaaaacaacagtgatgtccagacccattcccagaccagcaaaaccagagactgtagggatgggaccaagggaacactaatttaaaggctctttgggtgaactgaataggaagatagggtagggcaccatcatactagaataaactcaaaaatacaacttttgtgttcaaggaaaactctcaagctccatcgaagtatggacacactagtctgccaggtactctcctgaaactacacaccagcttctcaaagtgaaggtctgggccagtatgttacacaaataattgtccagttctagacttatttctgtttcacctaaattggccaaatatttgacttgtctcatccatatttattaaggactcatcagtgttttacttccacaggtgggattttccagtccaacttgcatgagtcttgaaggtgctgtcagtctaataagcctccccactcaatatttttttcattatctattcaccaagacccgcttataaatttacagctaataaaatctggtaaaatttagataagcaggacccatgtcctacaaagcattttctacctaggttgatagcatggcttcataaacccgattcaagatgctgtctctggaagaaacagtctacataattaccaatttattgtgcaaaaccacctcagaatggcaattttagataaagagctgtccgcatccaaatgaataaaacaaaataatcctgtttgaggcaccgcagttacattttgcttctcacgacttagcagtgtggcactatttaagcattcaatgagagtgctataaacttcttttatagaaaagacgtctcaaatcattgtttttgtgctttaatgctgcactcaatttcacacttactcgtttgaggactggaatcagggcctcctgagagcaaaaatctgtcgtctgtatttgcaacacctaggctggagctttgagcgtggtgggcggatcaaaaactgtttaattggtaggtagtacaacagaccccaaaaatgtctgacctataggtatttaatactattgtagcctatctcagtgggaagtgaacaaaacaatataacttagggtcttaactaacaccaccacttagggtcttcccaccacatcctggggattagaacatgggttcttccatcaacagcctgaaatagcactgcagctgcagtgagggggtgcaacatatgtactggcaagtcttcccagcaaatgctacttccgccccccactctcagcccactgggcagggcagccatctagaggaagactgtggcagggggttgggcttagaaatggcttcctaggtggctgatttgccatcatttattgcaagccactggcttaaaagagttctactgagggtagttcatagtcatgcacctcctgtgcaaaaagcctgatcaaggggccacagcccgccttcctgaagatcctacaagcttgatcccctatcaaatcaaatctggctaatctctgaatagctttacaaaactggctcactgggccaggcgaggtggttcacgcctgtaatcccagcactttgggaggctgaggtgggtggatcacggggtcagcagttcgagacaagcctggccaacatgatgaaaccccgtctctactacaaaatacagaaattagctgggcgtggaggtgccacgcctgtaatcccagctactcggaaggctgaggcagaattgcttgaacccgggaggcggaggttgcagtgagcggggacagtgccattgcactccagcctgggtgacagggtgagactccgtctaaaacaaacaaacaaacaaaaaaaaaaaacaaaaaaaaactggctcatcttgttttgaagtgttgacataaactaatagtcaaaagcaccactcaatcttttataatgcaagtgaaatcagtgctgtgccccttcaaggaaccatgtgacagtatgtttagttgagcaccagttccttgcaggaacagttgctggcagaagggctgtgtctacagcccatgtggaactaaggagttttcccattcagtagggagcatccctcagccttgatcttcaacatttcttctcttccctaatcttttctctcattttatttcttggctcatagaatttcattcttctcttaatgggcttcatttttaatgtctggctggctgtaacctacttcaaattctttatgaagtaggcaagatctgcacagccaattaatttttcaggacccacttcttatcatcacagaattatgaatgggaaataatagatgaaaaacacagacatgataaactgaacatagtatttattaaggtcaggatgcatgaatagactcttctcaacagaaagataattcaacagcaatcaatttacagaatttagaacagcactacatttcagcaaaatgcaactagagaacatcagataaattatagtaatttgtttttaaaaatccattaaactatctcttacctctgcaataatgtatcatacatgcagttacagaagttagtagggaaaagcatgatcttccttccctattctctgcccatccatcttccaggaaaccacaggctgctgctgcccagagttggcatgaggcttcgaggctgctgcttttccccctacatcataaccgatttcaaatggtgctagacaaaaacagactctgaacaccaggagaaatcggtcagcctgtgtaagagatgggccagtggtgctcccagggtctgcacctcgacagtccaggtggcaagtctgatttcgggtgccccgcaatcaacgccgaatactccagggcatcctctaagagcagactgatggtgtcgatgtggacaaaatggtcctccaggtgtactgccctctcccctgccccatgacaatcgacacccaatacattgttatccaacagaatatgacaatcgccacactcaaaggccctacgaacacattcatgctggtgatggctgctaggagtcaacagaaatagcatcacaacctctgcccctgctcaagccactgtgtttattttaaacacaacccccttctctactgtcacctctcccaaaacccaacaaactcaagagtgtattttgctcttcaagttcttccctggacttctcgaacagactcaagtggcaagaggagaggagccagttccatgagcagcagttcctctgcagtccacccttggctgtgctgcaattcttactcctaaaacactgatttcaaatggtgctagatacaaagatggaaaaatctaagccaccatgtgaaaccagcttccagaagaagaggatctcaatgaagaaagaagggagattcaatcggaagacccagcctctgccctgaggagaaatatcttcttgtagttctacttgtgatatgacacagtgctccatgggaaaggcacagaggaggttacacagggctgcacaaggcaacatgaaaggcacagctgatgcttcaaatagatgagagcaatacaaaactcattaattctaggttaattctatttaacttcacaccagtcactacaaattattatatatgatgaaataaaagctaaaattattactaaaatacattaatatttacatttgtactgccctgcatttgtatagtatttcacagtacacaaagtgtttccagatatattctcttacttcatcaggacacaagcaccctatctgcctgtggaatgaagctccagctgctacacaaaggcgagtctcacctgggccaggacaactcttttatgtgtcttaacttgagaaaagcatgcattcctccttcccaccccatatgtaagtatcagaacattcaaatatgaccccatgaacctgcaatcttatttaaccccgatgtgacttcaaaaactggtaccctataattgtattaagcagataatcctctaacgtaagaattgagttttattttcaaagtctgcttgaaaataagatttgcacactgtattccaaattagatttcccatctccttactgcatcatcttttttggtggtttgaagctaagaaaatatgtgtatttcctctgataccataaccaagagaaaagagacagagtagacactgtatattttagcttcctttcaggcctctagatacagccttataatttttatggttcctggcactaacagtatgtgttgctagaaggagaagaaatagaatttgaacatcaaaagttgcggtgtttaattctcacaacagtcgtatggggcaggtattattccaatttttgcgaagaaattcatccttaatgaggctaaataacttgtctgcagtcacacaaccaatcaatgcagatcccaggtctaactccaaagactgtgtttctgcccttgtatccactgcagcctgctccataacttgactatcatctcattttgttcttgaacttcattaagaacaaaacagggtgggtggggcaggaaattcctaggcgatacttctgcactgaatgggatcatactgactacataacacgttatacttagggggagacaggagcatcatctgggttctgcgaaagccgggtggtctggggcagcttgctttgttctcctgctcctctagcgcctttgccgtctttccccagcatgtggctgtgggaaagacactgaagatgaacctgcaacaagcgattctgacaccagcgctaggctctacagcccacgggggacttgctagcctcagtcacaggtgggagagctggggcagatctgcacacaagggctctcagtgatgacacctgtagccaacacctggggcttgttaaccaggtaacagccagggttgtaaggtcaggagtgagtgtttaaggacagttactactgggagtccaaatcctgtcaaatgaggggatttgatgagattctcacttttctgcttttcattttagccactcttccttatcaacttttagttaccagtaccccctccctatgagctatcacacaggtgtcccgcagtgatcagaaagcaccttcctccatggcgaggtcctgcctgcctaagctgttgtctcttctggaatactctccttcaccctcccttggctaccacccctcagccccgcccccacccaccaccactccagggaacctgtcatcctccccgcagctcaggaaagcctccctgagtccagcccttgctagaaggttaagtggtcctcgccagcctcaagttctttccttcaaaaaccacttatctcacttggtcatcagtgtgattatttaatgtctctcctgctacccgtaagggaccattcggagtacagcagaggggctgtgcatagcaggacgccactgccactgagggagttaacagaagccacagtctgggtccccactcctggattctaaaatttaactctttactctctggaagaagagataagaagccattaacaatgcatcactttaattaaacactctaaaagaagtggagaaaaaaatcatgttagtattgaaatcctttgcctttccaattccactggataaaaggggtccttcaggtctcagccctcccaacagaaccagttttctcctctcagaatcagctgagcaatgactcttcgctgaaacaagctggtggctgttccctactaggaagcagccagttagtttggtaagggctggaaggggcttgctttccctggcaccatgcctgaaggccacctagacctgtaagaaggcagcccatgaaaatcccagcctgctgagagctctgccatccaaggagggtgatgggttttacccacctcagcctaatgactccaaacaaactggctgaaggtgaaagggttggcagggctgtctggggaggaaaaccacccatccagaagggtgggcatgtcagtcttacgagtgctgccacgcatgggaaaggtgtgggagctatactctagcctggtccacttctgtccccacattctacctggaggcttctcgacctcacaccagggcattaatctgcttgggcacacagtgaatcagaacacaatggttttaatacctgcttggccccaactctgagaacagggacctgccacttgccctgaatgggcctcagtgtcttcatgtgtaaagagaggaggctgaggtaggctgctcacagcacattcaaatgctcggagggcttgggcaggaaacctgagacagagaagcagcaacagcatgcagcagaaatacagtgaactggagaggccatattttgtctaaatgcatgcaaaatcagatacattaaaataaccctagccaggtgtg

SEQ ID NO: 1314 - DNA, 3131 bp, Homo sapiens
cggctcgggccacgcccacctgtcctgcagcactggatgctttgtgagttggggattgttgcgtcccatatctggacccagaagggacttccctgctcggctggctctcggtttctctgctttcctccggagaaataacagcgtcttccgcgccgcgcatggagcctcccggccgccgcgagtgtccctttccttcctggcgctttcctgggttgcttctggcggccatggtgttgctgctgtactccttctccgatgcctgtgaggagccaccaacatttgaagctatggagctcattggtaaaccaaaaccctactatgagattggtgaacgagtagattataagtgtaaaaaaggatacttctatatacctcctcttgccacccatactatttgtgatcggaatcatacatggctacctgtctcagatgacgcctgttatagagaaacatgtccatatatacgggatcctttaaatggccaagcagtccctgcaaatgggacttacgagtttggttatcagatgcactttatttgtaatgagggttattacttaattggtgaagaaattctatattgtgaacttaaaggatcagtagcaatttggagcggtaagcccccaatatgtgaaaaggttttgtgtacaccacctccaaaaataaaaaatggaaaacacacctttagtgaagtagaagtatttgagtatcttgatgcagtaacttatagttgtgatcctgcacctggaccagatccattttcacttattggagagagcacgatttattgtggtgacaattcagtgtggagtcgtgctgctccagagtgtaaagtggtcaaatgtcgatttccagtagtcgaaaatggaaaacagatatcaggatttggaaaaaaattttactacaaagcaacagttatgtttgaatgcgataagggtttttacctcgatggcagcgacacaattgtctgtgacagtaacagtacttgggatcccccagttccaaagtgtcttaaaggtcctaggcctacttacaagcctccagtctcaaattatccaggatatcctaaacctgaggaaggaatacttgacagtttggatgtttgggtcattgctgtgattgttattgccatagttgttggagttgcagtaatttgtgttgtcccgtacagatatcttcaaaggaggaagaagaaagggaaagcagatggtggagctgaatatgccacttaccagactaaatcaaccactccagcagagcagagaggctgaatagattccacaacctggtttgccagttcatcttttgactctattaaaatcttcaatagttgttattctgtagtttcactctcatgagtgcaactgtggcttagctaatattgcaatgtggcttgaatgtaggtagcatcctttgatgcttctttgaaacttgtatgaatttgggtatgaacagattgcctgctttcccttaaataacacttagatttattggaccagtcagcacagcatgcctggttgtattaaagcagggatatgctgtattttataaaattggcaaaattagagaaatatagttcacaatgaaattatattttctttgtaaagaaagtggcttgaaatcttttttgttcaaagattaatgccaactcttaagattattctttcaccaactatagaatgtattttatatatcgttcattgtaaaaagcccttaaaaatatgtgtatactactttggctcttgtgcataaaaacaagaacactgaaaattgggaatatgcacaaacttggcttctttaaccaagaatattattggaaaattctctaaaagttaatagggtaaattctctattttttgtaatgtgttcggtgatttcagaaagctagaaagtgtatgtgtggcatttgttttcactttttaaaacatccctaactgatcgaatatatcagtaatttcagaatcagatgcatcctttcataagaagtgagaggactctgacagccataacaggagtgccacttcatggtgcgaagtgaacactgtagtcttgttgttttcccaaagagaactccgtatgttctcttaggttgagtaacccactctgaattctggttacatgtgtttttctctccctccttaaataaagagaggggttaaacatgccctctaaaagtaggataaattcatcagataacctcaagtcacatgagaatcttagtccatttacattgccttggctagtaaaagccatctatgtatatgtcttacctcatctcctaaaaggcagagtacaaagtaagccatgtatctcaggaaggtaacttcattttgtctatttgctgttgattgtaccaagggatggaagaagtaaatatagctcaggtagcactttatactcaggcagatctcagccctctactgagtcccttagccaagcagtttctttcaaagaagccagcaggcgaaaagcagggactgccactgcatttcatatcacactgttaaaagttgtgttttgaaattttatgtttagttgcacaaattgggccaaagaaacattgccttgaggaagatatgattggaaaatcaagagtgtagaagaataaatactgttttactgtccaaagacatgtttatagtgctctgtaaatgttcctttcctttgtagtctctggcaagatgctttaggaatttatacccgtttcacatgcttttcaagaatgtcgcaattactaagaagcagataatggtgttttttagaaacctaattgaagtatattcaaccaaatactttaatgtataaaataaatattatacaatatacttgtatagcagtttctgcttcacatttgattttttcaaatttaatatttatattagagatctatatatgtataaatatgtattttgtcaaatttgttacttaaatatatagagaccagttttctctggaagtttgtttaaatgacagaagcgtatatgaattcaagaaaatttaagctgcaaaaatgtatttgctataaaatgagaagtctcactgatagaggttctttattgctcattttttaaaaaatggactcttgaaatctgttaaaataaaattgtacatttggagatgtttcatgatgatgt

SEQ ID NO: 1315 - protein, 367 aa, Homo sapiens
MEPPGRRECPFPSWRFPGLLLAAMVLLKFSDACEEPPTFEAMELIGKPKPYYEIGERVDYKCKKGYFYIPPLATHTICDRNHTWLPVSDDACYRETCPYIRDPLNGQAVPANGTYEFGYQMHFICNEGYYLIGEEILYCELKGSVAIWSGKPPICEKVLCTPPPKIKNGKHTFSEVEVFEYLDAVTYSCDPAPGPDPFSLIGESTIYCGDNSVWSRAAPECKVVKCRFPVVENGKQISGFGKKFYYKATVMFECDKGFYLDGSDTIVCDSNSTWDPPVPKCLKGPRPTYKPPVSNYPGYPKPEEGILDSLDVWVIAVIVIAIVVGVAVICVVPYRYLQRRKKKGKADGGAEYATYQTKSTTPAEQRG

SEQ ID NO: 1316 - DNA, 4056 bp, Homo sapiens
caccggcgccgcgtcagcccccaggccgcctgcaggtgtgcgctcagaactagcacgtgtgccggacactatttaagggcccgcctctcctggctcacagctgcttgctgctccagccttgccctcccagagctgccggacgctcgcgggtctcggaacgcatcccgccgcgggggcttcggccgtggcatgggcgccgcgggcctgctcggggttttcttggctctcgtcgcaccgggggtcctcgggatttcttgtggctctcctccgcctatcctaaatggccggattagttattattctacccccattgctgttggtaccgtgataaggtacagttgttcaggtaccttccgcctcattggagaaaaaagtctattatgcataactaaagacaaagtggatggaacctgggataaacctgctcctaaatgtgaatatttcaataaatattcttcttgccctgagcccatagtaccaggaggatacaaaattagaggctctacaccctacagacatggtgattctgtgacatttgcctgtaaaaccaacttctccatgaacggaaacaagtctgtttggtgtcaagcaaataatatgtgggggccgacacgactaccaacctgtgtaagtgttttccctctcgagtgtccagcacttcctatgatccacaatggacatcacacaagtgagaatgttggctccattgctccaggattgtctgtgacttacagctgtgaatctggttacttgcttgttggagaaaagatcattaactgtttgtcttcgggaaaatggagtgctgtcccccccacatgtgaagaggcacgctgtaaatctctaggacgatttcccaatgggaaggtaaaggagcctccaattctccgggttggtgtaactgcaaactttttctgtgatgaagggtatcgactgcaaggcccaccttctagtcggtgtgtaattgctggacagggagttgcttggaccaaaatgccagtatgtgaagaaattttttgcccatcacctccccctattctcaatggaagacatataggcaactcactagcaaatgtctcatatggaagcatagtcacttacacttgtgacccggacccagaggaaggagtgaacttcatccttattggagagagcactctccgttgtacagttgatagtcagaagactgggacctggagtggccctgccccacgctgtgaactttctacttctgcggttcagtgtccacatccccagatcctaagaggccgaatggtatctgggcagaaagatcgatatacctataacgacactgtgatatttgcttgcatgtttggcttcaccttgaagggcagcaagcaaatccgatgcaatgcccaaggcacatgggagccatctgcaccagtctgtgaaaaggaatgccaggcccctcctaacatcctcaatgggcaaaaggaagatagacacatggtccgctttgaccctggaacatctataaaatatagctgtaaccctggctatgtgctggtgggagaagaatccatacagtgtacctctgagggggtgtggacaccccctgtaccccaatgcaaagtggcagcgtgtgaagctacaggaaggcaactcttgacaaaaccccagcaccaatttgttagaccagatgtcaactcttcttgtggtgaagggtacaagttaagtgggagtgtttatcaggagtgtcaaggcacaattccttggtttatggagattcgtctttgtaaagaaatcacctgcccaccaccccctgttatctacaatggggcacacaccgggagttccttagaagattttccatatggaaccacggtcacttacacatgtaaccctgggccagaaagaggagtggaattcagcctcattggagagagcaccatccgttgtacaagcaatgatcaagaaagaggcacctggagtggccctgctcccctgtgtaaactttccctccttgctgtccagtgctcacatgtccatattgcaaatggatacaagatatctggcaaggaagccccatatttctacaatgacactgtgacattcaagtgttatagtggatttactttgaagggcagtagtcagattcgttgcaaagctgataacacctgggatcctgaaataccagtttgtgaaaaagaaacatgccagcatgtgagacagagtcttcaagaacttccagctggttcacgtgtggagctagttaatacgtcctgccaagatgggtaccagttgactggacatgcttatcagatgtgtcaagatgctgaaaatggaatttggttcaaaaagattccactttgtaaagttattcactgtcaccctccaccagtgattgtcaatgggaagcacacaggcatgatggcagaaaactttctatatggaaatgaagtctcttatgaatgtgaccaaggattctatctcctgggagagaaaaaattgcagtgcagaagtgattctaaaggacatggatcttggagcgggccttccccacagtgcttacgatctcctcctgtgactcgctgccctaatccagaagtcaaacatgggtacaagctcaataaaacacattctgcatattcccacaatgacatagtgtatgttgactgcaatcctggcttcatcatgaatggtagtcgcgtgattaggtgtcatactgataacacatgggtgccaggtgtgccaacttgtatcaaaaaagccttcatagggtgtccacctccgcctaagacccctaacgggaaccatactggtggaaacatagctcgattttctcctggaatgtcaatcctgtacagctgtgaccaaggctacctgctggtgggagaggcactccttctttgcacacatgagggaacctggagccaacctgcccctcattgtaaagaggtaaactgtagctcaccagcagatatggatggaatccagaaagggctggaaccaaggaaaatgtatcagtatggagctgttgtaactctggagtgtgaagatgggtatatgctggaaggcagtccccagagccagtgccaatcggatcaccaatggaaccctcccctggcggtttgcagatcccgttcacttgctcctgtcctttgtggtattgctgcaggtttgatacttcttaccttcttgattgtcattaccttatacgtgatatcaaaacacagagaacgcaattattatacagatacaagccagaaagaagcttttcatttagaagcacgagaagtatattctgttgatccatacaacccagccagctgatcagaagacaaactggtgtgtgcctcattgcttggaattcagcggaatattgattagaaagaaactgctctaatatcagcaagtctctttatatggcctcaagatcaatgaaatgatgtcataagcgatcacttcctatatgcacttattctcaagaagaacatctttatggtaaagatgggagcccagtttcactgccatatactcttcaaggactttctgaagcctcacttatgagatgcctgaagccaggccatggctataaacaattacatggctctaaaaagttttgccctttttaaggaaggcactaaaaagagctgtcctggtatctagacccatcttctttttgaaatcagcatactcaatgttactatctgcttttggttataatgtgtttttaattatctaaagtatgaagcattttctggggttatgatggccttacctttattaggaagtatggttttattttgatagtagcttcctcctctggtggtgttaatcatttcatttttacccttacttggtttgagtttctctcacattactgtatatactttgcctttccataatcactcagtgattgcaatttgcacaagtttttttaaattatgggaatcaagatttaatcctagagatttggtgtacaattcaggctttggatgtttctttagcagttttgtgataagttctagttgcttgtaaaatttcacttaataatgtgtacattagtcattcaataaattgtaattgtaaagaaaa

SEQ ID NO: 1317 - protein, 1029 aa, Homo sapiens
MGAAGLLGVFLALVAPGVLGISCGSPPPILNGRISYYSTPIAVGTVIRYSCSGTFRLIGEKSLLCITKDKVDGTWDKPAPKCEYFNKYSSCPEPIVPGGYKIRGSTPYRHGDSVTFACKTNFSMNGNKSVWCQANNMWGPTRLPTCVSVFPLECPALPMIHNGHHTSENVGSIAPGLSVTYSCESGYLLVGEKIINCLSSGKWSAVPPTCEEARCKSLGRFPNGKVKEPPILRVGVTANFFCDEGYRLQGPPSSRCVIAGQGVAWTKMPVCEEIFCPSPPPILNGRHIGNSLANVSYGSIVTYTCDPDPEEGVNFILIGESTLRCTVDSQKTGTWSGPAPRCELSTSAVQCPHPQILRGRMVSGQKDRYTYNDTVIFACMFGFTLKGSKQIRCNAQGTWEPSAPVCEKECQAPPNILNGQKEDRHMVRFDPGTSIKYSCNPGYVLVGEESIQCTSEGVWTPPVPQCKVAACEATGRQLLTKPQHQFVRPDVNSSCGEGYKLSGSVYQECQGTIPWFMEIRLCKEITCPPPPVIYNGAHTGSSLEDFPYGTTVTYTCNPGPERGVEFSLIGESTIRCTSNDQERGTWSGPAPLCKLSLLAVQCSHVHIANGYKISGKEAPYFYNDTVTFKCGFTLKGSSQIRCKADNTWDPEIPVCEKETCQHVRQSLQELPAGSRVELVNTSCQDGYQLTGHAYQMCQDAENGIWFKKIPLCKVIHCHPPPVIVNGKHTGMMAENFLYGNEVSYECDQGFYLLGEKKLQCRSDSKGHGSWSGPSPQCLRSPPVTRCPNPEVKHGYKLNKTHSAYSHNDIVYVDCNPGFIMNGSRVIRCHTDNTWVPGVPTCIKKAFIGCPPPPKTPNGNHTGGNIARFSPGMSIKCDQGYLLVGEALLLCTHEGTWSQPAPHCKEVNCSSPADMDGIQKGLEPRKMYQYGAVVTLECEDGYMLEGSPQSQCQSDHQWNPPLAVCRSRSLAPVLCGIAAGLILLTFLIVITLYVISKHRERNYYTDTSQKEAFHLEAREVYSVDPYNPAS

SEQ ID NO: 1318 - DNA, 3067 bp, Homo sapiens
cggctcgggccacgcccacctgtcctgcagcactggatgctttgtgagttggggattgttgcgtcccatatctggacccagaagggacttccctgctcggctggctctcggtttctctgctttcctccggagaaataacagcgtcttccgcgccgcgcatggagcctcccggccgccgcgagtgtccctttccttcctggcgctttcctgggttgcttctggcggccatggtgttgctgctgtactccttctccgatgcctgtgaggagccaccaacatttgaagctatggagctcattggtaaaccaaaaccctactatgagattggtgaacgagtagattataagtgtaaaaaaggatacttctatatacctcctcttgccacccatactatttgtgatcggaatcatacatggctacctgtctcagatgacgcctgttatagagaaacatgtccatatatacgggatcctttaaatggccaagcagtccctgcaaatgggacttacgagtttggttatcagatgcactttatttgtaatgagggttattacttaattggtgaagaaattctatattgtgaacttaaaggatcagtagcaatttggagcggtaagcccccaatatgtgaaaaggttttgtgtacaccacctccaaaaataaaaaatggaaaacacacctttagtgaagtagaagtatttgagtatcttgatgcagtaacttatagttgtgatcctgcacctggaccagatccattttcacttattggagagagcacgatttattgtggtgacaattcagtgtggagtcgtgctgctccagagtgtaaagtggtcaaatgtcgatttccagtagtcgaaaatggaaaacagatatcaggatttggaaaaaaattttactacaaagcaacagttatgtttgaatgcgataagggtttttacctcgatggcagcgacacaattgtctgtgacagtaacagtacttgggatcccccagttccaaagtgtcttaaaggtcctaggcctacttacaagcctccagtctcaaattatccaggatatcctaaacctgaggaaggaatacttgacagtttggatgtttgggtcattgctgtgattgttattgccataggaaagcagatggtggagctgaatatgccacttaccagactaaatcaaccactccagcagagcagagaggctgaatagattccacaacctggtttgccagttcatcttttgactctattaaaatcttcaatagttgttattctgtagtttcactctcatgagtgcaactgtggcttagctaatattgcaatgtggcttgaatgtaggtagcatcctttgatgcttctttgaaacttgtatgaatttgggtatgaacagattgcctgctttcccttaaataacacttagatttattggaccagtcagcacagcatgcctggttgtattaaagcagggatatgctgtattttataaaattggcaaaattagagaaatatagttcacaatgaaattatattttctttgtaaagaaagtggcttgaaatcttttttgttcaaagattaatgccaactcttaagattattctttcaccaactatagaatgtattttatatatcgttcattgtaaaaagcccttaaaaatatgtgtatactactttggctcttgtgcataaaaacaagaacactgaaaattgggaatatgcacaaacttggcttctttaaccaagaatattattggaaaattctctaaaagttaatagggtaaattctctattttttgtaatgtgttcggtgatttcagaaagctagaaagtgtatgtgtggcatttgttttcactttttaaaacatccctaactgatcgaatatatcagtaatttcagaatcagatgcatcctttcataagaagtgagaggactctgacagccataacaggagtgccacttcatggtgcgaagtgaacactgtagtcttgttgttttcccaaagagaactccgtatgttctcttaggttgagtaacccactctgaattctggttacatgtgtttttctctccctccttaaataaagagaggggttaaacatgccctctaaaagtaggataaattcatcagataacctcaagtcacatgagaatcttagtccatttacattgccttggctagtaaaagccatctatgtatatgtcttacctcatctcctaaaaggcagagtacaaagtaagccatgtatctcaggaaggtaacttcattttgtctatttgctgttgattgtaccaagggatggaagaagtaaatatagctcaggtagcactttatactcaggcagatctcagccctctactgagtcccttagccaagcagtttctttcaaagaagccagcaggcgaaaagcagggactgccactgcatttcatatcacactgttaaaagttgtgttttgaaattttatgtttagttgcacaaattgggccaaagaaacattgccttgaggaagatatgattggaaaatcaagagtgtagaagaataaatactgttttactgtccaaagacatgtttatagtgctctgtaaatgttcctttcctttgtagtctctggcaagatgctttaggaatttatacccgtttcacatgcttttcaagaatgtcgcaattactaagaagcagataatggtgttttttagaaacctaattgaagtatattcaaccaaatactttaatgtataaaataaatattatacaatatacttgtatagcagtttctgcttcacatttgattttttcaaatttaatatttatattagagatctatatatgtataaatatgtattttgtcaaatttgttacttaaatatatagagaccagttttctctggaagtttgtttaaatgacagaagcgtatatgaattcaagaaaatttaagctgcaaaaatgtatttgctataaaatgagaagtctcactgatagaggttctttattgctcattttttaaaaaatggactcttgaaatctgttaaaataaaattgtacatttggagatgtttcatgatgatgt

SEQ ID NO: 1319 - protein, 347 aa, Homo sapiens
MEPPGRRECPFPSWRFPGLLLAAMVLLKFSDACEEPPTFEAMELIGKPKPYYEIGERVDYKCKKGYFYIPPLATHTICDRNHTWLPVSDDACYRETCPYIRDPLNGQAVPANGTYEFGYQMHFICNEGYYLIGEEILYCELKGSVAIWSGKPPICEKVLCTPPPKIKNGKHTFSEVEVFEYLDAVTYSCDPAPGPDPFSLIGESTIYCGDNSVWSRAAPECKVVKCRFPVVENGKQISGFGKKFYYKATVMFECDKGFYLDGSDTIVCDSNSTWDPPVPKCLKGPRPTYKPPVSNYPGYPKPEEGILDSLDVWVIAVIVIAIGKQMVELNMPLTRLNQPLQQSREAE

SEQ ID NO: 1320 - DNA, 1538 bp, Homo sapiens
gtgagtttggggattgttgtgtccactaaccggactcagaagggacttccctgctcggctggctttcggtttctctgctcacctccggataaatcacggggtctcccgcgccgctcatggcgcctcccgtccgtctcgagcgtccctttccttcccggcgctttcctgggttgcttctggcggccctggtgttgctgctgtcctccttctccgatcaatgcaatgtcccggaatggcttccatttgccaggcctaccaacctaactgatgactttgagtttcccattgggacatatctgaactatgaatgccgccctggttattccggaagaccgttttctatcatctgcctaaaaaactcagtctggacaagtgctaaggacaagtgcaaacgtaaatcatgtcgtaatcctccagatcctgtgaatggcatggcacatgtgatcaaagacatccagttcggatcccaaattaaatattcttgtcctaaaggataccgactcattggttcctcgtctgccacatgcatcatctcaggcaacactgtcatttgggataataaaacacctgtttgtgacagaattatttgtgggctaccccccaccatcgccaatggagatttcactagcatcagcagagagtattttcactatggatcagtggtgacctaccactgcaatcttggaagcagagggaaaaaggtgtttgagcttgtgggtgagccctccatatactgcaccagcaaagatgatcaagtgggcatctggagtggcccagcccctcagtgcattatacctaacaaatgcacgcctccaaatgtggaaaatggaatattggtatctgacaacagaagcttattttccttaaatgaagttgtggagtttaggtgtcagcctggctttggcatgaaagggccctcccatgtgaagtgccaggccctgaacaaatgggagccagagttaccaagctgctccagggtatgtcagccacctccagatgtcctgcatgctgagcgtacccaaagggacaaggacaacttttcacccgggcaggaagtgttctacagctgtgagcccggctacgacctcagaggatctacgtatttgcactgcacaccccagggagactggagccctgcagcccccagatgtgaagtgaaatcctgtgatgacttcctgggccaacttcctaatggccatgtgctatttccacttaatctccagcttggagcaaaagtggattttgtttgtgatgaaggatttcaattaaaaggcagctctgctagttactgtgttttggctggaatggaaagcctttggaatagcagtgttccagtgtgtgaacgtaaatcatgtgaaactcctccagttccagtgaatggcatggtgcatgtgatcacagacatccatgttggatccagaatcaactattcttgtactacagggcaccgactcattggtcactcatctgctgaatgtatcctctcgggcaatactgcccattggagcatgaagccaccaatttgtcaacgtgagttg

SEQ ID NO: 1321 - protein, 474 aa, Homo sapiens
MAPPVRLERPFPSRRFPGLLLAALVLLLSSFSDQCNVPEWLPFARPTNLTDDFEFPIGTYLNYECRPGYSGRPFSIICLKNSVWTSAKDKCKRKSCRNPPDPVNGMAHVIKDIQFGSQIKYSCPKGYRLIGSSSATCIISGNTVIWDNKTPVCDRIICGLPPTIANGDFTSISREYFHYGSVVTYHCNLGSRGKKVFELVGEPSIYCTSKDDQVGIWSGPAPQCIIPNKCTPPNVENGILVSDNRSLFSLNEVVEFRCQPGFGMKGPSHVKCQALNKWEPELPSCSRVCQPPPDVLHAERTQRDKDNFSPGQEVFYSCEPGYDLRGSTYLHCTPQGDWSPAAPRCEVKSCDDFLGQLPNGHVLFPLNLQLGAKVDFVCDEGFQLKGSSASYCVLAGMESLWNSSVPVCERKSCETPPVPVNGMVHVITDIHVGSRINYSCTTGHRLIGHSSAECILSGNTAHWSMKPPICQREL

SEQ ID NO: 1322 - DNA, 209 bp, Homo sapiens
ctgataacacctgggatcctgaaataccagtttgtgaaaaaggctgccagccacctcctgggctccaccatggtcatcatacaggtggaaatacggtcttctttgtctctgggatgactgtagactacacttgtgaccctggctatttgcttgtgggaaacaaatccattcactgtatgccttcaggaaattggagtccttctgcccca

SEQ ID NO: 1323 - protein, 32 aa, Homo sapiens
MTVDYTCDPGYLLVGNKSIHCMPSGNWSPSAP

SEQ ID NO: 1324 - DNA, 3199 bp, Homo sapiens
cggctcgggccacgcccacctgtcctgcagcactggatgctttgtgagttggggattgttgcgtcccatatctggacccagaagggacttccctgctcggctggctctcggtttctctgctttcctccggagaaataacagcgtcttccgcgccgcgcatggagcctcccggccgccgcgagtgtccctttccttcctggcgctttcctgggttgcttctggcggccatggtgttgctgctgtactccttctccgatgcctgtgaggagccaccaacatttgaagctatggagctcattggtaaaccaaaaccctactatgagattggtgaacgagtagattataagtgtaaaaaaggatacttctatatacctcctcttgccacccatactatttgtgatcggaatcatacatggctacctgtctcagatgacgcctgttatagagaaacatgtccatatatacgggatcctttaaatggccaagcagtccctgcaaatgggacttacgagtttggttatcagatgcactttatttgtaatgagggttattacttaattggtgaagaaattctatattgtgaacttaaaggatcagtagcaatttggagcggtaagcccccaatatgtgaaaaggttttgtgtacaccacctccaaaaataaaaaatggaaaacacacctttagtgaagtagaagtatttgagtatcttgatgcagtaacttatagttgtgatcctgcacctggaccagatccattttcacttattggagagagcacgatttattgtggtgacaattcagtgtggagtcgtgctgctccagagtgtaaagtggtcaaatgtcgatttccagtagtcgaaaatggaaaacagatatcaggatttggaaaaaaattttactacaaagcaacagttatgtttgaatgcgataagggtttttacctcgatggcagcgacacaattgtctgtgacagtaacagtacttgggatcccccagttccaaagtgtcttaaaggtcctaggcctacttacaagcctccagtctcaaattatccaggatatcctaaacctgaggaaggaatacttgacagtttggatgtttgggtcattgctgtgattgttattgccatagttgttggagttgcagtaatttgtgttgtcccgtacagatatcttcaaaggaggaagaagaaagggaaagcagatggtggagctgaatatgccacttaccagactaaatcaaccactccagcagagcagagaggctgaatagattccacaacctggtttgccagttcatcttttgactctattaaaatcttcaatagttgttattctgtagtttcactctcatgagtgcaactgtggcttagctaatattgcaatgtggcttgaatgtaggtagcatcctttgatgcttctttgaaacttgtatgaatttgggtatgaacagattgcctgctttcccttaaataacacttagatttattggaccagtcagcacagcatgcctggttgtattaaagcagggatatgctgtattttataaaattggcaaaattagagaaatatagttcacaatgaaattatattttctttgtaaagaaagtggcttgaaatcttttttgttcaaagattaatgccaactcttaagattattctttcaccaactatagaatgtattttatatatcgttcattgtaaaaagcccttaaaaatatgtgtatactactttggctcttgtgcataaaaacaagaacactgaaaattgggaatatgcacaaacttggcttctttaaccaagaatattattggaaaattctctaaaagttaatagggtaaattctctattttttgtaatgtgttcggtgatttcagaaagctagaaagtgtatgtgtggcatttgttttcactttttaaaacatccctaactgatcgaatatatcagtaatttcagaatcagatgcatcctttcataagaagtgagaggactctgacagccataacaggagtgccacttcatggtgcgaagtgaacactgtagtcttgttgttttcccaaagagaactccgtatgttctcttaggttgagtaacccactctgaattctggttacatgtgtttttctctccctccttaaataaagagaggggttaaacatgccctctaaaagtaggtggttttgaagagaataaattcatcagataacctcaagtcacatgagaatcttagtccatttacattgccttggctagtaaaagccatctatgtatatgtcttacctcatctcctaaaaggcagagtacaaagtaagccatgtatctcaggaaggtaacttcattttgtctatttgctgttgattgtaccaagggatggaagaagtaaatatagctcaggtagcactttatactcaggcagatctcagccctctactgagtcccttagccaagcagtttctttcaaagaagccagcaggcgaaaagcagggactgccactgcatttcatatcacactgttaaaagttgtgttttgaaattttatgtttagttgcacaaattgggccaaagaaacattgccttgaggaagatatgattggaaaatcaagagtgtagaagaataaatactgttttactgtccaaagacatgtttatagtgctctgtaaatgttcctttcctttgtagtctctggcaagatgctttaggaagataaaagtttgaggagaacaaacaggaattctgaattaagcacagagttgaagtttatacccgtttcacatgcttttcaagaatgtcgcaattactaagaagcagataatggtgttttttagaaacctaattgaagtatattcaaccaaatactttaatgtataaaataaatattatacaatatacttgtatagcagtttctgcttcacatttgattttttcaaatttaatatttatattagagatctatatatgtataaatatgtattttgtcaaatttgttacttaaatatatagagaccagttttctctggaagtttgtttaaatgacagaagcgtatatgaattcaagaaaatttaagctgcaaaaatgtatttgctataaaatgagaagtctcactgatagaggttctttattgctcattttttaaaaaatggactcttgaaatctgttaaaataaaattgtacatttggagatgtttcatgatgatgt

SEQ ID NO: 1325 - protein, 367 aa, Homo sapiens; identical to SEQ ID NO: 1315

SEQ ID NO: 1326 - DNA, 758 bp, Homo sapiens
cggactcagaagggacttccctgctcggctggctttcggtttctctgctcacctccggataaatcacggggtctcccgcgccgctcatggcgcctcccgtccgtctcgagcgtccctttccttcccggcgctttcctgggttgcttctggcggccctggtgttgctgctgtcctccttctccgatgcctatgaggagccaccaacatttgaagctatggagctcattggtaaaccaaaaccctactatgagattggggaacaagtagattataagtgtaaaaaaggacacttctacgtacctcctcttgccacccatactatttgtgatcggaatcacacatggctacctgtctcagatgagccctgttatagaaaaacatgtccatgtataggtgatcctttacatggccaagcagtccttgcaaatgggacttatgagctaggttatcagatacactttatttgtaatgagggttattacttaattggtaaagaaattctatattgtgaacttaaaggatcagtagcagtttggagcagtaagcccccaatatgtgaaaagattttgtgcacatgacctccaaaaataaaaaatggaaaacacacctttagtgaagtagaagtatttgagtatcttaatgcagtaactgatagttgtgatcctgcacctggaccagatccattttcacttattggagagagcacgatttattgtggtgacaattcagtatggaatcatgctgctccagagtgtaaa

SEQ ID NO: 1327 - protein, 163 aa, Homo sapiens
MAPPVRLERPFPSRRFPGLLLAALVLLLSSFSDAYEEPPTFEAMELIGKPKPYYEIGEQVDYKCKKGHFYVPPLATHTICDRNHTWLPVSDEPCYRKTCPCIGDPLHGQAVLANGTYELGYQIHFICNEGYYLIGKEILYCELKGSVAVWSSKPPICEKILCT

SEQ ID NO: 1328 - DNA, 3404 bp, Homo sapiens
acactctgggcgcggagcacaatgattggtcactcctattttcgctgagcttttcctcttatttcagttttcttcgagatcaaatctggtttgtagatgtgcttggggagaatgggggcctcttctccaagaagcccggagcctgtcgggccgccggcgcccggtctccccttctgctgcggaggatccctgctggcggttgtggtgctgcttgcgctgccggtggcctggggtcaatgcaatgccccagaatggcttccatttgccaggcctaccaacctaactgatgagtttgagtttcccattgggacatatctgaactatgaatgccgccctggttattccggaagaccgttttctatcatctgcctaaaaaactcagtctggactggtgctaaggacaggtgcagacgtaaatcatgtcgtaatcctccagatcctgtgaatggcatggtgcatgtgatcaaaggcatccagttcggatcccaaattaaatattcttgtactaaaggataccgactcattggttcctcgtctgccacatgcatcatctcaggtgatactgtcatttgggataatgaaacacctatttgtgacagaattccttgtgggctaccccccaccatcaccaatggagatttcattagcaccaacagagagaattttcactatggatcagtggtgacctaccgctgcaatcctggaagcggagggagaaaggtgtttgagcttgtgggtgagccctccatatactgcaccagcaatgacgatcaagtgggcatctggagcggccccgcccctcagtgcattatacctaacaaatgcacgcctccaaatgtggaaaatggaatattggtatctgacaacagaagcttattttccttaaatgaagttgtggagtttaggtgtcagcctggctttgtcatgaaaggaccccgccgtgtgaagtgccaggccctgaacaaatgggagccggagctaccaagctgctccagggtatgtcagccacctccagatgtcctgcatgctgagcgtacccaaagggacaaggacaacttttcacccgggcaggaagtgttctacagctgtgagcccggctacgacctcagaggggctgcgtctatgcgctgcacaccccagggagactggagccctgcagcccccacatgtgaagtgaaatcctgtgatgacttcatgggccaacttcttaatggccgtgtgctatttccagtaaatctccagcttggagcaaaagtggattttgtttgtgatgaaggatttcaattaaaaggcagctctgctagttattgtgtcttggctggaatggaaagcctttggaatagcagtgttccagtgtgtgaacaaatcttttgtccaaatcctccagctatccttaatgggagacacacaggaactccctttggagatattccctatggaaaagaaatatcttacgcatgcgacacccacccagacagagggatgaccttcaacctcattggggagagctccatccgctgcacaagtgaccctcaagggaatggggtttggagcagccctgcccctcgctgtgaactttctgttcctgctgcctgcccacatccacccaagatccaaaacgggcattacattggaggacacgtatctctatatcttcctgggatgacaatcagctacatttgtgaccccggctacctgttagtgggaaagggcttcattttctgtacagaccagggaatctggagccaattggatcattattgcaaagaagtaaattgtagcttcccactgtttatgaatggaatctcgaaggagttagaaatgaaaaaagtatatcactatggagattatgtgactttgaagtgtgaagatgggtatactctggaaggcagtccctggagccagtgccaggcggatgacagatgggaccctcctctggccaaatgtacctctcgtgcacatgatgctctcatagttggcactttatctggtacgatcttctttattttactcatcattttcctctcttggataattctaaagcacagaaaaggcaataatgcacatgaaaaccctaaagaagtggctatccatttacattctcaaggaggcagcagcgttcatccccgaactctgcaaacaaatgaagaaaatagcagggtccttccttgacaaagtactatacagctgaagaacatctcgaatacaattttggtgggaaaggagccaattgatttcaacagaatcagatctgagcttcataaagtctttgaagtgacttcacagagacgcagacatgtgcacttgaagatgctgccccttccctggtacctagcaaagctcctgcctctttgtgtgcgtcactgtgaaacccccacccttctgcctcgtgctaaacgcacacagtatctagtcaggggaaaagactgcatttaggagatagaaaatagtttggattacttaaaggaataaggtgttgcctggaatttctggtttgtaaggtggtcactgttcttttttaaaatatttgtaatatggaatgggctcagtaagaagagcttggaaaatgcagaaagttatgaaaaataagtcacttataattatgctacctactgataaccactcctaatattttgattcattttctgcctatcttctttcacatatgtgtttttttacatacgtacttttcccccttagtttgtttccttttattttatagagcagaaccctagtcttttaaacagtttagagtgaaatatatgctatatcagtttttactttctctagggagaaaaattaatttactagaaaggcatgaaatgatcatgggaagagtggttaagactactgaagagaaatatttggaaaataagatttcgatatcttctttttttttgagatggagtctggctctgtctcccaggctggagtgcagtggcgtaatctcggctcactgcaagctccgcctcccgggttgacaccattttcctgcctcagcctcctgagtagttgggactaccagtagatgggactacaggcacctgccaacacgcccggctaatttttttgtatttttagtagagacggggtttcaccatgttagccaggatggtctggatctcctgacctcgtgatccacccgcctcggcctcccaaagtgctgcgattacaggcatgagccaccgcgcctggccgctttcgatattttctaaactttaattcaaaagcactttgtgctgtgttctatataaaaaacataataaaaattgaaatgaaagaataattgttattataaaagtactagcttacttttgtatggattcagaatatactaaattaactttttaaaacacaacttttaaaaaatgtatcaaaataataaacgtgttctgatattttta

SEQ ID NO: 1329 - protein, 689 aa, Homo sapiens
MCLGRMGASSPRSPEPVGPPAPGLPFCCGGSLLAVVVLLALPVAWGQCNAPEWLPFARPTNLTDEFEFPIGTYLNYECRPGYSGRPFSIICLKNSVWTGAKDRCRRKSCRNPPDPVNGMVHVIKGIQFGSQIKYSCTKGYRLIGSSSATCIISGDTVIWDNETPICDRIPCGLPPTITNGDFISTNRENFHYGSVVYCNPGSGGRKVFELVGEPSIYCTSNDDQVGIWSGPAPQCIIPNKCTPPNVENGILVSDNRSLFSLNEVVEFRCQPGFVMKGPRRVKCQALNKWEPELPSCSRVCQPPPDVLHAERTQRDKDNFSPGQEVFYSCEPGYDLRGAASMRCTPQGDWSPAAPTCEVKSCDDFMGQLLNGRVLFPVNLQLGAKVDFVCDEGFQLKGSSASYCVLAGMESLWNSSVPVCEQIFCPNPPAILNGRHTGTPFGDIPYGKEISYACDTHPDRGMTFNLIGESSIRCTSDPQGNGVWSSPAPRCELSVPAACPHPPKIQNGHYIGGHVSLYLPGMTISYICDPGYLLVGKGFIFCTDQGIWSQLDHYCKEVNCSFPLFMNGISKELEMKKVYHYGDYVTLKCEDGYTLEGSPWSQCQADDRWDPPLAKCTSRAHDALIVGTLSGTIFFILLIIFLSWIILKHRKGNNAHENPKEVAIHLHSQGGSSVHPRTLQTNEENSRVLP

SEQ ID NO: 1330 - DNA, 270 bp, Homo sapiens
gtcaaatgtcgatttccagtagtcgaaaatggaaaacagatatcaggatttggaaaaaaattttactacaaagcaacagttatgtttgaatgcgataagggtttttacctcgatggcagcgacacaattgtctgtgacagtaacagtacttgggatcccccagttccaaagtgtcttaaagtgctgcctccatctagtacaaaacctccagctttgagtcattcagtgtcgacttcttccactacaaaatctccagcgtccagtgcctca

SEQ ID NO: 1331 - protein, 63 aa, Homo sapiens
MFECDKGFYLDGSDTIVCDSNSTWDPPVPKCLKVLPPSSTKPPALSHSVSTSSTTKSPASSAS

SEQ ID NO: 1332 - DNA, 3269 bp, Homo sapiens
cggctcgggccacgcccacctgtcctgcagcactggatgctttgtgagttggggattgttgcgtcccatatctggacccagaagggacttccctgctcggctggctctcggtttctctgctttcctccggagaaataacagcgtcttccgcgccgcgcatggagcctcccggccgccgcgagtgtccctttccttcctggcgctttcctgggttgcttctggcggccatggtgttgctgctgtactccttctccgatgcctgtgaggagccaccaacatttgaagctatggagctcattggtaaaccaaaaccctactatgagattggtgaacgagtagattataagtgtaaaaaaggatacttctatatacctcctcttgccacccatactatttgtgatcggaatcatacatggctacctgtctcagatgacgcctgttatagagaaacatgtccatatatacgggatcctttaaatggccaagcagtccctgcaaatgggacttacgagtttggttatcagatgcactttatttgtaatgagggttattacttaattggtgaagaaattctatattgtgaacttaaaggatcagtagcaatttggagcggtaagcccccaatatgtgaaaaggttttgtgtacaccacctccaaaaataaaaaatggaaaacacacctttagtgaagtagaagtatttgagtatcttgatgcagtaacttatagttgtgatcctgcacctggaccagatccattttcacttattggagagagcacgatttattgtggtgacaattcagtgtggagtcgtgctgctccagagtgtaaagtggtcaaatgtcgatttccagtagtcgaaaatggaaaacagatatcaggatttggaaaaaaattttactacaaagcaacagttatgtttgaatgcgataagggtttttacctcgatggcagcgacacaattgtctgtgacagtaacagtacttgggatcccccagttccaaagtgtcttaaagtgtcgacttcttccactacaaaatctccagcgtccagtgcctcaggtcctaggcctacttacaagcctccagtctcaaattatccaggatatcctaaacctgaggaaggaatacttgacagtttggatgtttgggtcattgctgtgattgttattgccatagttgttggagttgcagtaatttgtgttgtcccgtacagatatcttcaaaggaggaagaagaaaggcacatacctaactgatgagacccacagagaagtaaaatttacttctctctgagaaggagagatgagagaaaggtttgcttttatcattaaaaggaaagcagatggtggagctgaatatgccacttaccagactaaatcaaccactccagcagagcagagaggctgaatagattccacaacctggtttgccagttcatcttttgactctattaaaatcttcaatagttgttattctgtagtttcactctcatgagtgcaactgtggcttagctaatattgcaatgtggcttgaatgtaggtagcatcctttgatgcttctttgaaacttgtatgaatttgggtatgaacagattgcctgctttcccttaaataacacttagatttattggaccagtcagcacagcatgcctggttgtattaaagcagggatatgctgtattttataaaattggcaaaattagagaaatatagttcacaatgaaattatattttctttgtaaagaaagtggcttgaaatcttttttgttcaaagattaatgccaactcttaagattattctttcaccaactatagaatgtattttatatatcgttcattgtaaaaagcccttaaaaatatgtgtatactactttggctcttgtgcataaaaacaagaacactgaaaattgggaatatgcacaaacttggcttctttaaccaagaatattattggaaaattctctaaaagttaatagggtaaattctctattttttgtaatgtgttcggtgatttcagaaagctagaaagtgtatgtgtggcatttgttttcactttttaaaacatccctaactgatcgaatatatcagtaatttcagaatcagatgcatcctttcataagaagtgagaggactctgacagccataacaggagtgccacttcatggtgcgaagtgaacactgtagtcttgttgttttcccaaagagaactccgtatgttctcttaggttgagtaacccactctgaattctggttacatgtgtttttctctccctccttaaataaagagaggggttaaacatgccctctaaaagtaggataaattcatcagataacctcaagtcacatgagaatcttagtccatttacattgccttggctagtaaaagccatctatgtatatgtcttacctcatctcctaaaaggcagagtacaaagtaagccatgtatctcaggaaggtaacttcattttgtctatttgctgttgattgtaccaagggatggaagaagtaaatatagctcaggtagcactttatactcaggcagatctcagccctctactgagtcccttagccaagcagtttctttcaaagaagccagcaggcgaaaagcagggactgccactgcatttcatatcacactgttaaaagttgtgttttgaaattttatgtttagttgcacaaattgggccaaagaaacattgccttgaggaagatatgattggaaaatcaagagtgtagaagaataaatactgttttactgtccaaagacatgtttatagtgctctgtaaatgttcctttcctttgtagtctctggcaagatgctttaggaatttatacccgtttcacatgcttttcaagaatgtcgcaattactaagaagcagataatggtgttttttagaaacctaattgaagtatattcaaccaaatactttaatgtataaaataaatattatacaatatacttgtatagcagtttctgcttcacatttgattttttcaaatttaatatttatattagagatctatatatgtataaatatgtattttgtcaaatttgttacttaaatatatagagaccagttttctctggaagtttgtttaaatgacagaagcgtatatgaattcaagaaaatttaagctgcaaaaatgtatttgctataaaatgagaagtctcactgatagaggttctttattgctcattttttaaaaaatggactcttgaaatctgttaaaataaaattgtacatttggagatgtttcatgatgatgt

SEQ ID NO: 1333 - protein, 373 aa, Homo sapiens
MEPPGRRECPFPSWRFPGLLLAAMVLLKFSDACEEPPTFEAMELIGKPKPYYEIGERVDYKCKKGYFYIPPLATHTICDRNHTWLPVSDDACYRETCPYIRDPLNGQAVPANGTYEFGYQMHFICNEGYYLIGEEILYCELKGSVAIWSGKPPICEKVLCTPPPKIKNGKHTFSEVEVFEYLDAVTYSCDPAPGPDPFSLIGESTIYCGDNSVWSRAAPECKVVKCRFPVVENGKQISGFGKKFYYKATVMFECDKGFYLDGSDTIVCDSNSTWDPPVPKCLKVSTSSTTKSPASSASGPRPTYKPPVSNYPGYPKPEEGILDSLDVWVIAVIVIAIVVGVAVICVVPYRYLQRRKKKGTYLTDETEVKFTSL

SEQ ID NO: 1334 - DNA, 614 bp, Homo sapiens
cggactcagaagggacttccctgctcggctggctttcggtttctctgctcacctccggataaatcacggggtctcccgcgccgctcatggcgcctcccgtccgtctcgagcgtccctttccttcccggcgctttcctgggttgcttctggcggccctggtgttgctgctgtcctccttctccgatgcctatgaggagccaccaacatttgaagctatggagctcattggtaaaccaaaaccctactatgagattggggaacaagtagattataagtgtaaaaaaggacacttctacgtacctcctcttgccacccatactatttgtgatcggaatcacacatggctacctgtctcagatgagccctgttatagaaaaacatgtccatgtataggtgatcctttacatggccaagcagtccttgcaaatgggacttatgagctaggttatcagatacactttatttgtaatgagggttattacttaattggtaaagaaattctatattgtgaacttaaaggatcagtagcagtttggagcagtaagcccccaatatgtgaaagtaaagattttgtgcacatgacctccaaaaataaaaaatggaaaacacacctt

SEQ ID NO: 1335 - protein, 176 aa, Homo sapiens
MAPPVRLERPFPSRRFPGLLLAALVLLLSSFSDAYEEPPTFEAMELIGKPKPYYEIGEQVDYKCKKGHFYVPPLATHTICDRNHTWLPVSDEPCYRKTCPCIGDPLHGQAVLANGTYELGYQIHFICNEGYYLIGKEILYCELKGSVAVWSSKPPICESKDFVHMTSKNKKWKTHL

SEQ ID NO: 1336 - DNA, 4233 bp, Homo sapiens
caccggcgccgcgtcagcccccaggccgcctgcaggtgtgcgctcagaactagcacgtgtgccggacactatttaagggcccgcctctcctggctcacagctgcttgctgctccagccttgccctcccagagctgccggacgctcgcgggtctcggaacgcatcccgccgcgggggcttcggccgtggcatgggcgccgcgggcctgctcggggttttcttggctctcgtcgcaccgggggtcctcgggatttcttgtggctctcctccgcctatcctaaatggccggattagttattattctacccccattgctgttggtaccgtgataaggtacagttgttcaggtaccttccgcctcattggagaaaaaagtctattatgcataactaaagacaaagtggatggaacctgggataaacctgctcctaaatgtgaatatttcaataaatattcttcttgccctgagcccatagtaccaggaggatacaaaattagaggctctacaccctacagacatggtgattctgtgacatttgcctgtaaaaccaacttctccatgaacggaaacaagtctgtttggtgtcaagcaaataatatgtgggggccgacacgactaccaacctgtgtaagtgttttccctctcgagtgtccagcacttcctatgatccacaatggacatcacacaagtgagaatgttggctccattgctccaggattgtctgtgacttacagctgtgaatctggttacttgcttgttggagaaaagatcattaactgtttgtcttcgggaaaatggagtgctgtcccccccacatgtgaagaggcacgctgtaaatctctaggacgatttcccaatgggaaggtaaaggagcctccaattctccgggttggtgtaactgcaaactttttctgtgatgaagggtatcgactgcaaggcccaccttctagtcggtgtgtaattgctggacagggagttgcttggaccaaaatgccagtatgtgaagaaattttttgcccatcacctccccctattctcaatggaagacatataggcaactcactagcaaatgtctcatatggaagcatagtcacttacacttgtgacccggacccagaggaaggagtgaacttcatccttattggagagagcactctccgttgtacagttgatagtcagaagactgggacctggagtggccctgccccacgctgtgaactttctacttctgcggttcagtgtccacatccccagatcctaagaggccgaatggtatctgggcagaaagatcgatatacctataacgacactgtgatatttgcttgcatgtttggcttcaccttgaagggcagcaagcaaatccgatgcaatgcccaaggcacatgggagccatctgcaccagtctgtgaaaaggaatgccaggcccctcctaacatcctcaatgggcaaaaggaagatagacacatggtccgctttgaccctggaacatctataaaatatagctgtaaccctggctatgtgctggtgggagaagaatccatacagtgtacctctgagggggtgtggacaccccctgtaccccaatgcaaagtggcagcgtgtgaagctacaggaaggcaactcttgacaaaaccccagcaccaatttgttagaccagatgtcaactcttcttgtggtgaagggtacaagttaagtgggagtgtttatcaggagtgtcaaggcacaattccttggtttatggagattcgtctttgtaaagaaatcacctgcccaccaccccctgttatctacaatggggcacacaccgggagttccttagaagattttccatatggaaccacggtcacttacacatgtaaccctgggccagaaagaggagtggaattcagcctcattggagagagcaccatccgttgtacaagcaatgatcaagaaagaggcacctggagtggccctgctcccctgtgtaaactttccctccttgctgtccagtgctcacatgtccatattgcaaatggatacaagatatctggcaaggaagccccatatttctacaatgacactgtgacattcaagtgttatagtggatttactttgaagggcagtagtcagattcgttgcaaagctgataacacctgggatcctgaaataccagtttgtgaaaaaggctgccagccacctcctgggctccaccatggtcatcatacaggtggaaatacggtcttctttgtctctgggatgactgtagactacacttgtgaccctggctatttgcttgtgggaaacaaatccattcactgtatgccttcaggaaattggagtccttctgccccacggtgtgaagaaacatgccagcatgtgagacagagtcttcaagaacttccagctggttcacgtgtggagctagttaatacgtcctgccaagatgggtaccagttgactggacatgcttatcagatgtgtcaagatgctgaaaatggaatttggttcaaaaagattccactttgtaaagttattcactgtcaccctccaccagtgattgtcaatgggaagcacacaggcatgatggcagaaaactttctatatggaaatgaagtctcttatgaatgtgaccaaggattctatctcctgggagagaaaaaattgcagtgcagaagtgattctaaaggacatggatcttggagcgggccttccccacagtgcttacgatctcctcctgtgactcgctgccctaatccagaagtcaaacatgggtacaagctcaataaaacacattctgcatattcccacaatgacatagtgtatgttgactgcaatcctggcttcatcatgaatggtagtcgcgtgattaggtgtcatactgataacacatgggtgccaggtgtgccaacttgtatcaaaaaagccttcatagggtgtccacctccgcctaagacccctaacgggaaccatactggtggaaacatagctcgattttctcctggaatgtcaatcctgtacagctgtgaccaaggctacctgctggtgggagaggcactccttctttgcacacatgagggaacctggagccaacctgcccctcattgtaaagaggtaaactgtagctcaccagcagatatggatggaatccagaaagggctggaaccaaggaaaatgtatcagtatggagctgttgtaactctggagtgtgaagatgggtatatgctggaaggcagtccccagagccagtgccaatcggatcaccaatggaaccctcccctggcggtttgcagatcccgttcacttgctcctgtcctttgtggtattgctgcaggtttgatacttcttaccttcttgattgtcattaccttatacgtgatatcaaaacacagagaacgcaattattatacagatacaagccagaaagaagcttttcatttagaagcacgagaagtatattctgttgatccatacaacccagccagctgatcagaagacaaactggtgtgtgcctcattgcttggaattcagcggaatattgattagaaagaaactgctctaatatcagcaagtctctttatatggcctcaagatcaatgaaatgatgtcataagcgatcacttcctatatgcacttattctcaagaagaacatctttatggtaaagatgggagcccagtttcactgccatatactcttcaaggactttctgaagcctcacttatgagatgcctgaagccaggccatggctataaacaattacatggctctaaaaagttttgccctttttaaggaaggcactaaaaagagctgtcctggtatctagacccatcttctttttgaaatcagcatactcaatgttactatctgcttttggttataatgtgtttttaattatctaaagtatgaagcattttctggggttatgatggccttacctttattaggaagtatggttttattttgatagtagcttcctcctctggtggtgttaatcatttcatttttacccttacttggtttgagtttctctcacattactgtatatactttgcctttccataatcactcagtgattgcaatttgcacaagtttttttaaattatgggaatcaagatttaatcctagagatttggtgtacaattcaggctttggatgtttctttagcagttttgtgataagttctagttgcttgtaaaatttcacttaataatgtgtacattagtcattcaataaattgtaattgtaaagaaaa

SEQ ID NO: 1337 - protein, 1088 aa, Homo sapiens
MGAAGLLGVFLALVAPGVLGISCGSPPPILNGRISYYSTPIAVGTVIRYSCSGTFRLIGEKSLLCITKDKVDGTWDKPAPKCEYFNKYSSCPEPIVPGGYKIRGSTPYRHGDSVTFACKTNFSMNGNKSVWCQANNMWGPTRLPTCVSVFPLECPALPMIHNGHHTSENVGSIAPGLSVTYSCESGYLLVGEKIINCLSSGKWSAVPPTCEEARCKSLGRFPNGKVKEPPILRVGVTANFFCDEGYRLQGPPSSRCVIAGQGVAWTKMPVCEEIFCPSPPPILNGRHIGNSLANVSYGSIVTYTCDPDPEEGVNFILIGESTLRCTVDSQKTGTWSGPAPRCELSTSAVQCPHPQILRGRMVSGQKDRYTYNDTVIFACMFGFTLKGSKQIRCNAQGTWEPSAPVCEKECQAPPNILNGQKEDRHMVRFDPGTSIKYSCNPGYVLVGEESIQCTSEGVWTPPVPQCKVAACEATGRQLLTKPQHQFVRPDVNSSCGEGYKLSGSVYQECQGTIPWFMEIRLCKEITCPPPPVIYNGAHTGSSLEDFPYGTTVTYTCNPGPERGVEFSLIGESTIRCTSNDQERGTWSGPAPLCKLSLLAVQCSHVHIANGYKISGKEAPYFYNDTVTFKCGFTLKGSSQIRCKADNTWDPEIPVCEKGCQPPPGLHHGHHTGGNTVFFVSGMTVDYTCDPGYLLVGNKSIHCMPSGNWSPSAPRCEETCQHVRQSLQELPAGSRVELVNTSCQDGYQLTGHAYQMCQDAENGIWFKKIPLCKVIHCHPPPVIVNGKHTGMMAENFLYGNEVSYECDQGFYLLGEKKLQCRSDSKGHGSWSGPSPQCLRSPPVTRCPNPEVKHGYKLNKTHSAYSHNDIVYVDCNPGFIMNGSRVIRCHTDNTWVPGVPTCIKKAFIGCPPPPKTPNGNHTGGNIARFSPGMSIKCDQGYLLVGEALLLCTHEGTWSQPAPHCKEVNCSSPADMDGIQKGLEPRKMYQYGAVVTLECEDGYMLEGSPQSQCQSDHQWNPPLAVCRSRSLAPVLCGIAAGLILLTFLIVITLYVISKHRERNYYTDTSQKEAFHLEAREVYSVDPYNPAS

SEQ ID NO: 1338 - DNA, 6909 bp, Homo sapiens
acactctgggcgcggagcacaatgattggtcactcctattttcgctgagcttttcctcttatttcagttttcttcgagatcaaatctggtttgtagatgtgcttggggagaatgggggcctcttctccaagaagcccggagcctgtcgggccgccggcgcccggtctccccttctgctgcggaggatccctgctggcggttgtggtgctgcttgcgctgccggtggcctggggtcaatgcaatgccccagaatggcttccatttgccaggcctaccaacctaactgatgagtttgagtttcccattgggacatatctgaactatgaatgccgccctggttattccggaagaccgttttctatcatctgcctaaaaaactcagtctggactggtgctaaggacaggtgcagacgtaaatcatgtcgtaatcctccagatcctgtgaatggcatggtgcatgtgatcaaaggcatccagttcggatcccaaattaaatattcttgtactaaaggataccgactcattggttcctcgtctgccacatgcatcatctcaggtgatactgtcatttgggataatgaaacacctatttgtgacagaattccttgtgggctaccccccaccatcaccaatggagatttcattagcaccaacagagagaattttcactatggatcagtggtgacctaccgctgcaatcctggaagcggagggagaaaggtgtttgagcttgtgggtgagccctccatatactgcaccagcaatgacgatcaagtgggcatctggagcggccccgcccctcagtgcattatacctaacaaatgcacgcctccaaatgtggaaaatggaatattggtatctgacaacagaagcttattttccttaaatgaagttgtggagtttaggtgtcagcctggctttgtcatgaaaggaccccgccgtgtgaagtgccaggccctgaacaaatgggagccggagctaccaagctgctccagggtatgtcagccacctccagatgtcctgcatgctgagcgtacccaaagggacaaggacaacttttcacccgggcaggaagtgttctacagctgtgagcccggctacgacctcagaggggctgcgtctatgcgctgcacaccccagggagactggagccctgcagcccccacatgtgaagtgaaatcctgtgatgacttcatgggccaacttcttaatggccgtgtgctatttccagtaaatctccagcttggagcaaaagtggattttgtttgtgatgaaggatttcaattaaaaggcagctctgctagttactgtgtcttggctggaatggaaagcctttggaatagcagtgttccagtgtgtgaacaaatcttttgtccaagtcctccagttattcctaatgggagacacacaggaaaacctctggaagtctttccctttgggaaaacagtaaattacacatgcgacccccacccagacagagggacgagcttcgacctcattggagagagcaccatccgctgcacaagtgaccctcaagggaatggggtttggagcagccctgcccctcgctgtggaattctgggtggcaccgactcattggtcactcatctgctgaatgtatcctctcgggcaatgctgcccattggagcacgaagccgccaatttgtcaacgaattccttgtgggctaccccccaccatcgccaatggagatttcattagcaccaacagagagaattttcactatggatcagtggtgacctaccgctgcaatcctggaagcggagggagaaaggtgtttgagcttgtgggtgagccctccatatactgcaccagcaatgacgatcaagtgggcatctggagcggcccggcccctcagtgcattacacctaacaaatgcacgcctccaaatgtggaaaatggaatattggtatctgacaacagaagcttattttccttaaatgaagttgtggagtttaggtgtcagcctggctttgtcatgaaaggaccccgccgtgtgaagtgccaggccctgaacaaatgggagccggagctaccaagctgctccagggtatgtcagccacctccagatgtcctgcatgctgagcgtacccaaagggacaaggacaacttttcacccgggcaggaagtgttctacagctgtgagcccggctacgacctcagaggggctgcgtctatgcgctgcacaccccagggagactggagccctgcagcccccacatgtgaagtgaaatcctgtgatgacttcatgggccaacttcttaatggccgtgtgctatttccagtaaatctccagcttggagcaaaagtggattttgtttgtgatgaaggatttcaattaaaaggcagctctgctagttattgtgtcttggctggaatggaaagcctttggaatagcagtgttccagtgtgtgaacaaatcttttgtccaagtcctccagttattcctaatgggagacacacaggaaaacctctggaagtctttccctttggaaaagcagtaaattacacatgcgacccccacccagacagagggacgagcttcgacctcattggagagagcaccatccgctgcacaagtgaccctcaagggaatggggtttggagcagccctgcccctcgctgtggaattctgggtggcaccgactcattggtcactcatctgctgaatgtatcctctcaggcaatactgcccattggagcacgaagccgccaatttgtcaacgaattccttgtgggctacccccaaccatcgccaatggagatttcattagcaccaacagagagaattttcactatggatcagtggtgacctaccgctgcaatcttggaagcagagggagaaaggtgtttgagcttgtgggtgagccctccatatactgcaccagcaatgacgatcaagtgggcatctggagcggccccgcccctcagtgcattatacctaacaaatgcacgcctccaaatgtggaaaatggaatattggtatctgacaacagaagcttattttccttaaatgaagttgtggagtttaggtgtcagcctggctttgtcatgaaaggaccccgccgtgtgaagtgccaggccctgaacaaatgggagccagagttaccaagctgctccagggtgtgtcagccgcctccagaaatcctgcatggtgagcataccccaagccatcaggacaacttttcacctgggcaggaagtgttctacagctgtgagcctggctatgacctcagaggggctgcgtctctgcactgcacaccccagggagactggagccctgaagccccgagatgtgcagtgaaatcctgtgatgacttcttgggtcaactccctcatggccgtgtgctatttccacttaatctccagcttggggcaaaggtgtcctttgtctgtgatgaagggtttcgcttaaagggcagttccgttagtcattgtgtcttggttggaatgagaagcctttggaataacagtgttcctgtgtgtgaacatatcttttgtccaaatcctccagctatccttaatgggagacacacaggaactccctctggagatattccctatggaaaagaaatatcttacacatgtgacccccacccagacagagggatgaccttcaacctcattggggagagcaccatccgctgcacaagtgaccctcatgggaatggggtttggagcagccctgcccctcgctgtgaactttctgttcgtgctggtcactgtaaaaccccagagcagtttccatttgccagtcctacgatcccaattaatgactttgagtttccagtcgggacatctttgaattatgaatgccgtcctgggtattttgggaaaatgttctctatctcctgcctagaaaacttggtctggtcaagtgttgaagacaactgtagacgaaaatcatgtggacctccaccagaacccttcaatggaatggtgcatataaacacagatacacagtttggatcaacagttaattattcttgtaatgaagggtttcgactcattggttccccatctactacttgtctcgtctcaggcaataatgtcacatgggataagaaggcacctatttgtgagatcatatcttgtgagccacctccaaccatatccaatggagacttctacagcaacaatagaacatcttttcacaatggaacggtggtaacttaccagtgccacactggaccagatggagaacagctgtttgagcttgtgggagaacggtcaatatattgcaccagcaaagatgatcaagttggtgtttggagcagccctccccctcggtgtatttctactaataaatgcacagctccagaagttgaaaatgcaattagagtaccaggaaacaggagtttctttaccctcactgagatcatcagatttagatgtcagcccgggtttgtcatggtagggtcccacactgtgcagtgccagaccaatggcagatgggggcccaagctgccacactgctccagggtgtgtcagccgcctccagaaatcctgcatggtgagcataccctaagccatcaggacaacttttcacctgggcaggaagtgttctacagctgtgagcccagctatgacctcagaggggctgcgtctctgcactgcacgccccagggagactggagccctgaagcccctagatgtacagtgaaatcctgtgatgacttcctgggccaactccctcatggccgtgtgctacttccacttaatctccagcttggggcaaaggtgtcctttgtttgcgatgaagggttccgattaaaaggcaggtctgctagtcattgtgtcttggctggaatgaaagccctttggaatagcagtgttccagtgtgtgaacaaatcttttgtccaaatcctccagctatccttaatgggagacacacaggaactccctttggagatattccctatggaaaagaaatatcttacgcatgcgacacccacccagacagagggatgaccttcaacctcattggggagagctccatccgctgcacaagtgaccctcaagggaatggggtttggagcagccctgcccctcgctgtgaactttctgttcctgctgcctgcccacatccacccaagatccaaaacgggcattacattggaggacacgtatctctatatcttcctgggatgacaatcagctacatttgtgaccccggctacctgttagtgggaaagggcttcattttctgtacagaccagggaatctggagccaattggatcattattgcaaagaagtaaattgtagcttcccactgtttatgaatggaatctcgaaggagttagaaatgaaaaaagtatatcactatggagattatgtgactttgaagtgtgaagatgggtatactctggaaggcagtccctggagccagtgccaggcggatgacagatgggaccctcctctggccaaatgtacctctcgtgcacatgatgctctcatagttggcactttatctggtacgatcttctttattttactcatcattttcctctcttggataattctaaagcacagaaaaggcaataatgcacatgaaaaccctaaagaagtggctatccatttacattctcaaggaggcagcagcgttcatccccgaactctgcaaacaaatgaagaaaatagcagggtccttccttgacaaagtactatacagctgaagaacatctcgaatacaattttggtgggaaaggagccaattgatttcaacagaatcagatctgagcttcataaagtctttgaagtgacttcacagagacgcagacatgtgcacttgaagatgctgccccttccctggtacctagcaaagctcctgcctctttgtgtgcgtcactgtgaaacccccacccttctgcctcgtgctaaacgcacacagtatctagtcaggggaaaagactgcatttaggagatagaaaatagtttggattacttaaaggaataaggtgttgcctggaatttctggtttgtaaggtggtcactgttcttttttaaaatatttgtaatatggaatgggctcagtaagaagagcttggaaaatgcagaaagttatgaaaaataagtcacttataattatgctacctactgataaccactcctaatattttgattcattttctgcctatcttctttcacatatgtgtttttttacatacgtacttttcccccttagtttgtttccttttattttatagagcagaaccctagtcttttaaacagtttagagtgaaatatatgctatatcagtttttactttctctagggagaaaaattaatttactagaaaggcatgaaatgatcatgggaagagtggttaagactactgaagagaaatatttggaaaataagatttcgatatcttctttttttttgagatggagtctggctctgtctcccaggctggagtgcagtggcgtaatctcggctcactgcaagctccgcctcccgggttgacaccattttcctgcctcagcctcctgagtagttgggactaccagtagatgggactacaggcacctgccaacacgcccggctaatttttttgtatttttagtagagacggggtttcaccatgttagccaggatggtctggatctcctgacctcgtgatccacccgcctcggcctcccaaagtgctgcgattacaggcatgagccaccgcgcctggccgctttcgatattttctaaactttaattcaaaagcactttgtgctgtgttctatataaaaaacataataaaaattgaaatgaaagaataattgttattataaaagtactagcttacttttgtatggattcagaatatactaaattaactttttaaaacacaacttttaaaaaatgtatcaaaataataaacgtgttctgatattttta

SEQ ID NO: 1339 - protein, 866 aa, Homo sapiens
MKGPRRVKCQALNKWEPELPSCSRVCQPPPEILHGEHTPSHQDNFSPGQEVFYSCEPGYDLRGAASLHCTPQGDWSPEAPRCAVKSCDDFLGQLPHGRVLFPLNLQLGAKVSFVCDEGFRLKGSSVSHCVLVGMRSLWNNSVPVCEHIFCPNPPAILNGRHTGTPSGDIPYGKEISYTCDPHPDRGMTFNLIGESTIRCTSDPHGNGVWSSPAPRCELSVRAGHCKTPEQFPFDTIPINDFEFPVGTSLNYECRPGYFGKMFSISCLENLVWSSVEDNCRRKSCGPPPEPFNGMVHINTDTQFGSTVNYSCNEGFRLIGSPSTTCLVSGNNVTWDKKAPICEIISCEPPPTISNGDFYSNNRTSFHNGTVVTYQCHTGPDGEQLFELVGERSIYCTSKDDQVGVWSSPPPRCISTNKCTAPEVENAIRVPGNRSFFTLTEIIRFRCQPGFVMVGSHTVQCQTNGRWGPKLPHCSRVCQPPPEILHGEHTLSHQDNFSPGQEVFYSCEPSYDLRGAASLHCTPQGDWSPEAPRCTVKSCDDFLGQLPHGRVLLPLNLQLGAKVSFVCDEGFRLKGRSASHCVLAGMKALWNSSVPVCEQIFCPNPPAILNGRHTGTPFGDIPYGKEISYACDTHPDRGMTFNLIGESSIRCTSDPQGNGVWSSPAPRCELSVPAACPHPPKIQNGHYIGGHVSLYLPGMTISYICDPGYLLVGKGFIFCTDQGIWSQLDHYCKEVNCSFPLFMNGISKELEMKKVYHYGDYVTLKCEDGYTLEGSPWSQCQADDRWDPPLAKCTSRAHDALIVGTLSGTIFFILLIIFLSWIILKHRKGNNAHENPKEVAIHLHSQGGSSVHPRTLQTNEENSRVLP

SEQ ID NO: 1340 - DNA, 3176 bp, Homo sapiens
cggctcgggccacgcccacctgtcctgcagcactggatgctttgtgagttggggattgttgcgtcccatatctggacccagaagggacttccctgctcggctggctctcggtttctctgctttcctccggagaaataacagcgtcttccgcgccgcgcatggagcctcccggccgccgcgagtgtccctttccttcctggcgctttcctgggttgcttctggcggccatggtgttgctgctgtactccttctccgatgcctgtgaggagccaccaacatttgaagctatggagctcattggtaaaccaaaaccctactatgagattggtgaacgagtagattataagtgtaaaaaaggatacttctatatacctcctcttgccacccatactatttgtgatcggaatcatacatggctacctgtctcagatgacgcctgttatagagaaacatgtccatatatacgggatcctttaaatggccaagcagtccctgcaaatgggacttacgagtttggttatcagatgcactttatttgtaatgagggttattacttaattggtgaagaaattctatattgtgaacttaaaggatcagtagcaatttggagcggtaagcccccaatatgtgaaaaggttttgtgtacaccacctccaaaaataaaaaatggaaaacacacctttagtgaagtagaagtatttgagtatcttgatgcagtaacttatagttgtgatcctgcacctggaccagatccattttcacttattggagagagcacgatttattgtggtgacaattcagtgtggagtcgtgctgctccagagtgtaaagtggtcaaatgtcgatttccagtagtcgaaaatggaaaacagatatcaggatttggaaaaaaattttactacaaagcaacagttatgtttgaatgcgataagggtttttacctcgatggcagcgacacaattgtctgtgacagtaacagtacttgggatcccccagttccaaagtgtcttaaagtgtcgacttcttccactacaaaatctccagcgtccagtgcctcaggtcctaggcctacttacaagcctccagtctcaaattatccaggatatcctaaacctgaggaaggaatacttgacagtttggatgtttgggtcattgctgtgattgttattgccatagttgttggagttgcagtaatttgtgttgtcccgtacagatatcttcaaaggaggaagaagaaagggaaagcagatggtggagctgaatatgccacttaccagactaaatcaaccactccagcagagcagagaggctgaatagattccacaacctggtttgccagttcatcttttgactctattaaaatcttcaatagttgttattctgtagtttcactctcatgagtgcaactgtggcttagctaatattgcaatgtggcttgaatgtaggtagcatcctttgatgcttctttgaaacttgtatgaatttgggtatgaacagattgcctgctttcccttaaataacacttagatttattggaccagtcagcacagcatgcctggttgtattaaagcagggatatgctgtattttataaaattggcaaaattagagaaatatagttcacaatgaaattatattttctttgtaaagaaagtggcttgaaatcttttttgttcaaagattaatgccaactcttaagattattctttcaccaactatagaatgtattttatatatcgttcattgtaaaaagcccttaaaaatatgtgtatactactttggctcttgtgcataaaaacaagaacactgaaaattgggaatatgcacaaacttggcttctttaaccaagaatattattggaaaattctctaaaagttaatagggtaaattctctattttttgtaatgtgttcggtgatttcagaaagctagaaagtgtatgtgtggcatttgttttcactttttaaaacatccctaactgatcgaatatatcagtaatttcagaatcagatgcatcctttcataagaagtgagaggactctgacagccataacaggagtgccacttcatggtgcgaagtgaacactgtagtcttgttgttttcccaaagagaactccgtatgttctcttaggttgagtaacccactctgaattctggttacatgtgtttttctctccctccttaaataaagagaggggttaaacatgccctctaaaagtaggataaattcatcagataacctcaagtcacatgagaatcttagtccatttacattgccttggctagtaaaagccatctatgtatatgtcttacctcatctcctaaaaggcagagtacaaagtaagccatgtatctcaggaaggtaacttcattttgtctatttgctgttgattgtaccaagggatggaagaagtaaatatagctcaggtagcactttatactcaggcagatctcagccctctactgagtcccttagccaagcagtttctttcaaagaagccagcaggcgaaaagcagggactgccactgcatttcatatcacactgttaaaagttgtgttttgaaattttatgtttagttgcacaaattgggccaaagaaacattgccttgaggaagatatgattggaaaatcaagagtgtagaagaataaatactgttttactgtccaaagacatgtttatagtgctctgtaaatgttcctttcctttgtagtctctggcaagatgctttaggaatttatacccgtttcacatgcttttcaagaatgtcgcaattactaagaagcagataatggtgttttttagaaacctaattgaagtatattcaaccaaatactttaatgtataaaataaatattatacaatatacttgtatagcagtttctgcttcacatttgattttttcaaatttaatatttatattagagatctatatatgtataaatatgtattttgtcaaatttgttacttaaatatatagagaccagttttctctggaagtttgtttaaatgacagaagcgtatatgaattcaagaaaatttaagctgcaaaaatgtatttgctataaaatgagaagtctcactgatagaggttctttattgctcattttttaaaaaatggactcttgaaatctgttaaaataaaattgtacatttggagatgtttcatgatgatgt

SEQ ID NO: 1341 - protein, 382 aa, Homo sapiens
MEPPGRRECPFPSWRFPGLLLAAMVLLKFSDACEEPPTFEAMELIGKPKPYYEIGERVDYKCKKGYFYIPPLATHTICDRNHTWLPVSDDACYRETCPYIRDPLNGQAVPANGTYEFGYQMHFICNEGYYLIGEEILYCELKGSVAIWSGKPPICEKVLCTPPPKIKNGKHTFSEVEVFEYLDAVTYSCDPAPGPDPFSLIGESTIYCGDNSVWSRAAPECKVVKCRFPVVENGKQISGFGKKFYYKATVMFECDKGFYLDGSDTIVCDSNSTWDPPVPKCLKVSTSSTTKSPASSASGPRPTYKPPVSNYPGYPKPEEGILDSLDVWVIAVIVIAIVVGVAVICVVPYRYLQRRKKKGKADGGAEYATYQTKSTTPAEQRG

SEQ ID NO: 1342 - DNA, 8474 bp, Homo sapiens
caccggcgccgcgtcagcccccaggccgcctgcaggtgtgcgctcagaactagcacgtgtgccggacactatttaagggcccgcctctcctggctcacagctgcttgctgctccagccttgccctcccagagctgccggacgctcgcgggtctcggaacgcatcccgccgcgggggcttcggccgtggcatgggcgccgcgggcctgctcggggttttcttggctctcgtcgcaccgggggtcctcgggatttcttgtggctctcctccgcctatcctaaatggccggattagttattattctacccccattgctgttggtaccgtgataaggtacagttgttcaggtaccttccgcctcattggagaaaaaagtctattatgcataactaaagacaaagtggatggaacctgggataaacctgctcctaaatgtgaatatttcaataaatattcttcttgccctgagcccatagtaccaggaggatacaaaattagaggctctacaccctacagacatggtgattctgtgacatttgcctgtaaaaccaacttctccatgaacggaaacaagtctgtttggtgtcaagcaaataatatgtgggggccgacacgactaccaacctgtgtaagtgttttccctctcgagtgtccagcacttcctatgatccacaatggacatcacacaagtgagaatgttggctccattgctccaggattgtctgtgacttacagctgtgaatctggttacttgcttgttggagaaaagatcattaactgtttgtcttcgggaaaatggagtgctgtcccccccacatgtgaagaggcacgctgtaaatctctaggacgatttcccaatgggaaggtaaaggagcctccaattctccgggttggtgtaactgcaaactttttctgtgatgaagggtatcgactgcaaggcccaccttctagtcggtgtgtaattgctggacagggagttgcttggaccaaaatgccagtatgtgaagaaattttttgcccatcacctccccctattctcaatggaagacatataggcaactcactagcaaatgtctcatatggaagcatagtcacttacacttgtgacccggacccagaggaaggagtgaacttcatccttattggagagagcactctccgttgtacagttgatagtcagaagactgggacctggagtggccctgccccacgctgtgaactttctacttctgcggttcagtgtccacatccccagatcctaagaggccgaatggtatctgggcagaaagatcgatatacctataacgacactgtgatatttgcttgcatgtttggcttcaccttgaagggcagcaagcaaatccgatgcaatgcccaaggcacatgggagccatctgcaccagtctgtgaaaaggaatgccaggcccctcctaacatcctcaatgggcaaaaggaagatagacacatggtccgctttgaccctggaacatctataaaatatagctgtaaccctggctatgtgctggtgggagaagaatccatacagtgtacctctgagggggtgtggacaccccctgtaccccaatgcaaaggctgccagccacctcctgggctccaccatggtcatcatacaggtggaaatacggtcttctttgtctctgggatgactgtagactacacttgtgaccctggctatttgcttgtgggaaacaaatccattcactgtatgccttcaggaaattggagtccttctgccccacggtgtgaagttattcactgtcaccctccaccagtgattgtcaatgggaagcacacaggcatgatggcagaaaactttctatatggaaatgaagtctcttatgaatgtgaccaaggattctatctcctgggagagaaaaaattgcagtgcagaagtgattctaaaggacatggatcttggagcgggccttccccacagtgcttacgatctcctcctgtgactcgctgccctaatccagaagtcaaacatgggtacaagctcaataaaacacattctgcatattcccacaatgacatagtgtatgttgactgcaatcctggcttcatcatgaatggtagtcgcgtgattaggtgtcatactgataacacatgggtgccaggtgtgccaacttgtatcaaaaaagccttcatagggtgtccacctccgcctaagacccctaacgggaaccatactggtggaaacatagctcgattttctcctggaatgtcaatcctgtacagctgtgaccaaggctacctgctggtgggagaggcactccttctttgcacacatgagggaacctggagccaacctgcccctcattgtaaagaggtaaactgtagctcaccagcagatatggatggaatccagaaagggctggaaccaaggaaaatgtatcagtatggagctgttgtaactctggagtgtgaagatgggtatatgctggaaggcagtccccagagccagtgccaatcggatcaccaatggaaccctcccctggcggtttgcagatcccgtcaatgcaatgccccagaatggcttccatttgccaggcctaccaacctaactgatgagtttgagtttcccattgggacatatctgaactatgaatgccgccctggttattccggaagaccgttttctatcatctgcctaaaaaactcagtctggactggtgctaaggacaggtgcagacgaattccttgtgggctaccccccaccatcaccaatggagatttcattagcaccaacagagagaattttcactatggatcagtggtgacctaccgctgcaatcctggaagcggagggagaaaggtgtttgagcttgtgggtgagccctccatatactgcaccagcaatgacgatcaagtgggcatctggagcggccccgcccctcagtgcattatacctaacaaatgcacgcctccaaatgtggaaaatggaatattggtatctgacaacagaagcttattttccttaaatgaagttgtggagtttaggtgtcagcctggctttgtcatgaaaggaccccgccgtgtgaagtgccaggccctgaacaaatgggagccggagctaccaagctgctccagggatgtcctgcatgctgagcgtacccaaagggacaaggacaacttttcacccgggcaggaagtgttctacagctgtgagcccggctacgacctcagaggggctgcgtctatgcgctgcacaccccagggagactggagccctgcagcccccacatgtgaaggaattccttgtgggctaccccccaccatcgccaatggagatttcattagcaccaacagagagaattttcactatggatcagtggtgacctaccgctgcaatcctggaagcggagggagaaaggtgtttgagcttgtgggtgagccctccatatactgcaccagcaatgacgatcaagtgggcatctggagcggcccggcccctcagtgcattacacctaacaaatgcacgcctccaaatgtggaaaatggaatattggtatctgacaacagaagcttattttccttaaatgaagttgtggagtttaggtgtcagcctggctttgtcatgaaaggaccccgccgtgtgaagtgccaggccctgaacaaatgggagccggagctaccaagctgctccagggtatgtcagccacctccagatgtcctgcatgctgagcgtacccaaagggacaaggacaacttttcacccgggcaggaagtgttctacagctgtgagcccggctacgacctcagaggggctgcgtctatgcgctgcacaccccagggagactggagccctgcagcccccacatgtgaaggaattccttgtgggctacccccaaccatcgccaatggagatttcattagcaccaacagagagaattttcactatggatcagtggtgacctaccgctgcaatcttggaagcagagggagaaaggtgtttgagcttgtgggtgagccctccatatactgcaccagcaatgacgatcaagtgggcatctggagcggccccgcccctcagtgcattatacctaacaaatgcacgcctccaaatgtggaaaatggaatattggtatctgacaacagaagcttattttccttaaatgaagttgtggagtttaggtgtcagcctggctttgtcatgaaaggaccccgccgtgtgaagtgccaggccctgaacaaatgggagccagagttaccaagctgctccagggtgtgtcagccgcctccagaaatcctgcatggtgagcataccccaagccatcaggacaacttttcacctgggcaggaagtgttctacagctgtgagcctggctatgacctcagaggggctgcgtctctgcactgcacaccccagggagactggagccctgaagccccgagatgtgcagtgaaatcctgtgatgacttcttgggtcaactccctcatggccgtgtgctatttccacttaatctccagcttggggcaaaggtgtcctttgtctgtgatgaagggtttcgcttaaagggcagttccgttagtcattgtgtcttggttggaatgagaagcctttggaataacagtgttcctgtgtgtgaacatatcttttgtccaaatcctccagctatccttaatgggagacacacaggaactccctctggagatattccctatggaaaagaaatatcttacacatgtgacccccacccagacagagggatgaccttcaacctcattggggagagcaccatccgctgcacaagtgaccctcatgggaatggggtttggagcagccctgcccctcgctgtgaactttctgttcgtgctggtcactgtaaaaccccagagcagtttccatttgccagtcctacgatcccaattaatgactttgagtttccagtcgggacatctttgaattatgaatgccgtcctgggtattttgggaaaatgttctctatctcctgcctagaaaacttggtctggtcaagtgttgaagacaactgtagacgaaaatcatgtggacctccaccagaacccttcaatggaatggtgcatataaacacagatacacagtttggatcaacagttaattattcttgtaatgaagggtttcgactcattggttccccatctactacttgtctcgtctcaggcaataatgtcacatgggataagaaggcacctatttgtgagatcatatcttgtgagccacctccaaccatatccaatggagacttctacagcaacaatagaacatcttttcacaatggaacggtggtaacttaccagtgccacactggaccagatggagaacagctgtttgagcttgtgggagaacggtcaatatattgcaccagcaaagatgatcaagttggtgtttggagcagccctccccctcggtgtatttctactaataaatgcacagctccagaagttgaaaatgcaattagagtaccaggaaacaggagtttctttaccctcactgagatcatcagatttagatgtcagcccgggtttgtcatggtagggtcccacactgtgcagtgccagaccaatggcagatgggggcccaagctgccacactgctccagggaagtaaattgtagcttcccactgtttatgaatggaatctcgaaggagttagaaatgaaaaaagtatatcactatggagattatgtgactttgaagtgtgaagatgggtatactctggaaggcagtccctggagccagtgccaggcggatgacagatgggaccctcctctggccaaatgtacctctctatgtcagccacctccagatgtcctgcatgctgagcgtacccaaagggacaaggacaacttttcacccgggcaggaagtgttctacagctgtgagcccggctacgacctcagaggatctacgtatttgcactgcacaccccagggagactggagccctgcagcccccagatgtgaagtggtcaaatgtcgatttccagtagtcgaaaatggaaaacagatatcaggatttggaaaaaaattttactacaaagcaacagttatgtttgaatgcgataagggtttttacctcgatggcagcgacacaattgtctgtgacagtaacagtacttgggatcccccagttccaaagtgtcttaaagtgtcgacttcttccactacaaaatctccagcgtccagtgcctcaggtcctaggcctacttacaagcctccagtctcaaattatccaggatatcctaaacctgaggaaggaatacttgacagtttggatgtttgggtcattgctgtgattgttattgccatagttgttggagttgcagtaatttgtgttgtcccgtacagatatcttcaaaggaggaagaagaaaggcacatacctaactgatgagacccacagagaagtaaaatttacttctctctgagaaggagagatgagagaaaggtttgcttttatcattaaaaggaaagcagatggtggagctgaatatgccacttaccagactaaatcaaccactccagcagagcagagaggctgaatagattccacaacctggtttgccagttcatcttttgactctattaaaatcttcaatagttgttattctgtagtttcactctcatgagtgcaactgtggcttagctaatattgcaatgtggcttgaatgtaggtagcatcctttgatgcttctttgaaacttgtatgaatttgggtatgaacagattgcctgctttcccttaaataacacttagatttattggaccagtcagcacagcatgcctggttgtattaaagcagggatatgctgtattttataaaattggcaaaattagagaaatatagttcacaatgaaattatattttctttgtaaagaaagtggcttgaaatcttttttgttcaaagattaatgccaactcttaagattattctttcaccaactatagaatgtattttatatatcgttcattgtaaaaagcccttaaaaatatgtgtatactactttggctcttgtgcataaaaacaagaacactgaaaattgggaatatgcacaaacttggcttctttaaccaagaatattattggaaaattctctaaaagttaatagggtaaattctctattttttgtaatgtgttcggtgatttcagaaagctagaaagtgtatgtgtggcatttgttttcactttttaaaacatccctaactgatcgaatatatcagtaatttcagaatcagatgcatcctttcataagaagtgagaggactctgacagccataacaggagtgccacttcatggtgcgaagtgaacactgtagtcttgttgttttcccaaagagaactccgtatgttctcttaggttgagtaacccactctgaattctggttacatgtgtttttctctccctccttaaataaagagaggggttaaacatgccctctaaaagtaggtggttttgaagagaataaattcatcagataacctcaagtcacatgagaatcttagtccatttacattgccttggctagtaaaagccatctatgtatatgtcttacctcatctcctaaaaggcagagtacaaagtaagccatgtatctcaggaaggtaacttcattttgtctatttgctgttgattgtaccaagggatggaagaagtaaatatagctcaggtagcactttatactcaggcagatctcagccctctactgagtcccttagccaagcagtttctttcaaagaagccagcaggcgaaaagcagggactgccactgcatttcatatcacactgttaaaagttgtgttttgaaattttatgtttagttgcacaaattgggccaaagaaacattgccttgaggaagatatgattggaaaatcaagagtgtagaagaataaatactgttttactgtccaaagacatgtttatagtgctctgtaaatgttcctttcctttgtagtctctggcaagatgctttaggaagataaaagtttgaggagaacaaacaggaattctgaattaagcacagagttgaagtttatacccgtttcacatgcttttcaagaatgtcgcaattactaagaagcagataatggtgttttttagaaacctaattgaagtatattcaaccaaatactttaatgtataaaataaatattatacaatatacttgtatagcagtttctgcttcacatttgattttttcaaatttaatatttatattagagatctatatatgtataaatatgtattttgtcaaatttgttacttaaatatatagagaccagttttctctggaagtttgtttaaatgacagaagcgtatatgaattcaagaaaatttaagctgcaaaaatgtatttgctataaaatgagaagtctcactgatagaggttctttattgctcattttttaaaaaatggactcttgaaatctgttaaaataaaattgtacatttggagatgtttcatgatgatgt

SEQ ID NO: 1343 - protein, 2067 aa, Homo sapiens
MGAAGLLGVFLALVAPGVLGISCGSPPPILNGRISYYSTPIAVGTVIRYSCSGTFRLIGEKSLLCITKDKVDGTWDKPAPKCEYFNKYSSCPEPIVPGGYKIRGSTPYRHGDSVTFACKTNFSMNGNKSVWCQANNMWGPTRLPTCVSVFPLECPALPMIHNGHHTSENVGSIAPGLSVTYSCESGYLLVGEKIINCLSSGKWSAVPPTCEEARCKSLGRFPNGKVKEPPILRVGVTANFFCDEGYRLQGPPSSRCVIAGQGVAWTKMPVCEEIFCPSPPPILNGRHIGNSLANVSYGSIVTYTCDPDPEEGVNFILIGESTLRCTVDSQKTGTWSGPAPRCELSTSAVQCPHPQILRGRMVSGQKDRYTYNDTVIFACMFGFTLKGSKQIRCNAQGTWEPSAPVCEKECQAPPNILNGQKEDRHMVRFDPGTSIKYSCNPGYVLVGEESIQCTSEGVWTPPVPQCKGCQPPPGLHHGHHTGGNTVFFVSGMTVDYTCDPGYLLVGNKSIHCMPSGNWSPSAPRCEVIHCHPPPVIVNGKHTGMMAENFLYGNEVSYECDQGFYLLGEKKLQCRSDSKGHGSWSGPSPQCLRSPPVTRCPNPEVKHGYKLNKTHSAYSHNDIVYVDCNPGFIMNGSRVIRCHTDNTWVPGVPTCIKKAFIGCPPPPKTPNGNHTGGNIARFSPGMSIKCDQGYLLVGEALLLCTHEGTWSQPAPHCKEVNCSSPADMDGIQKGLEPRKMYQYGAVVTLECEDGYMLEGSPQSQCQSDHQWNPPLAVCRSRQCNAPEWLPFARPTNLTDEFEFPIGTYLNYECRPGYSGRPFSIICLKNSVWTGAKDRCRRIPCGLPPTITNGDFISTNRENFHYGSVVYCNPGSGGRKVFELVGEPSIYCTSNDDQVGIWSGPAPQCIIPNKCTPPNVENGILVSDNRSLFSLNEVVEFRCQPGFVMKGPRRVKCQALNKWEPELPSCSRDVLHAERTQRDKDNFSPGQEVFYSCEPGYDLRGAASMRCTPQGDWSPAAPTCEGIPCGLPPTIANGDFISTNRENFHYGSVVYCNPGSGGRKVFELVGEPSIYCTSNDDQVGIWSGPAPQCITPNKCTPPNVENGILVSDNRSLFSLNEVVEFRCQPGFVMKGPRRVKCQALNKWEPELPSCSRVCQPPPDVLHAERTQRDKDNFSPGQEVFYSCEPGYDLRGAASMRCTPQGDWSPAAPTCEGIPCGLPPTIANGDFISTNRENFHYGSVVYCNLGSRGRKVFELVGEPSIYCTSNDDQVGIWSGPAPQCIIPNKCTPPNVENGILVSDNRSLFSLNEVVEFRCQPGFVMKGPRRVKCQALNKWEPELPSCSRVCQPPPEILHGEHTPSHQDNFSPGQEVFYSCEPGYDLRGAASLHCTPQGDWSPEAPRCAVKSCDDFLGQLPHGRVLFPLNLQLGAKVSFVCDEGFRLKGSSVSHCVLVGMRSLWNNSVPVCEHIFCPNPPAILNGRHTGTPSGDIPYGKEISYTCDPHPDRGMTFNLIGESTIRCTSDPHGNGVWSSPAPRCELSVRAGHCKTPEQFPFDTIPINDFEFPVGTSLNYECRPGYFGKMFSISCLENLVWSSVEDNCRRKSCGPPPEPFNGMVHINTDTQFGSTVNYSCNEGFRLIGSPSTTCLVSGNNVTWDKKAPICEIISCEPPPTISNGDFYSNNRTSFHNGTVVTYQCHTGPDGEQLFELVGERSIYCTSKDDQVGVWSSPPPRCISTNKCTAPEVENAIRVPGNRSFFTLTEIIRFRCQPGFVMVGSHTVQCQTNGRWGPKLPHCSREVNCSFPLFMNGISKELEMKKVYHYGDYVTLKCEDGYTLEGSPWSQCQADDRWDPPLAKCTSLCQPPPDVLHAERTQRDKDNFSPGQEVFYSCEPGYDLRGSTYLHCTPQGDWSPAAPRCEVVKCRFPVVENGKQISGFGKKFYYKATVMFECDKGFYLDGSDTIVCDSNSTWDPPVPKCLKVSTSSTTKSPASSASGPRPTYKPPVSNYPGYPKPEEGILDSLDVWVIAVIVIAIVVGVAVICVVPYRYLQRRKKKGTYLTDETEVKFTSL

SEQ ID NO: 1344 - DNA, 26394 bp, Mus musculus
  misc_feature (1)...(26394): n = A,T,C or G
gtttcctgattttagttggattttttttctcccaggtttctgcagtgtccccaccccccacccccattttctcccactcttacccaagagccttaactcttccattgtggattctactttcctcctgattccagtgatcttcagggtcatggcagccttggagtatcaggctgctgttcccaatgtgggatgcagagggcactgccagcctggttatcacgcaccactgtcacacagggaagcgcccccttcccaggatcttaatatttctcctctcttctatttcacagaggagatgcttggtaaggcagtgtcttcaggtcccaggtccctgctaataaatgaatccatgttaaagccacattcccaggaactgggataccgtgtttgcctcgcttgcatgaagccctagtttggatcaccagcactgcaaaagccaggaattggtggcgcatgactgtaaccccagcacttgggaggcaggaagatcagaagttcaaggctattcctcacctcccagcattctgtagacactctcaaaaacccaaagcaaggcctgtggtggtgcaagccttcaaccctaacacttggaaggcagaggcagatggatctctgtgagttcgaggctagcctggtctacattgagagttgcagggcagccagggctacatggagaatccctgactaaggggacaaggaagcacttgctgccaagcctgaggatatgagtccccgagcgtcgctggatggaaggagagaagactgacctctgacctccacaggcatccagtgtcccatgcacacacatgcacatgcagacaaagtaaataagaaaacaaattaaatgtaggctggacggatagatggttcattggttaaggggacttactgctcttccagaggacctgaggtgtttcccagcacccaggtcaggcagcttataactgtctgtaactcctgctcctgctttctccaaggacgttcccacacaaatgtgaatacgcatatgggcataaacaaaaagctacaaagtgaacctttaattttttttaatgtgtgaacaaaacaacaacagcaaacaaaacaaaacaaaacaaaaaaaaaaaaagaaaggcctccccaaaacaaagaagacccagcagatgaaagaaagtgtttgctgagctgggcgtggtggcacacgcctttaatcccagcacttgggaggcagaggcaggcggatttatgagttcgaggccagcctggtctacagagtgagttccaggactgccaggcaatacagagaaaccctgtctcgaaaaaaccaaaaaccaaccaaccaaccaaccaaacaaacaaacaaacaagtgtttgctggcaagccaggtgagctgcgcctcatccctggggcccatgtgatgaaagcagagacctgattctaaacacttgtcttttgatctccatgagcttgcacacttgctcacatacaatacacacacacacacacacacagatgcacacacagacatacacacacacatacgcacatgcacatgagcgcacacgcatgtacacacatgcaggcacacatacaataaaatataagaagattgctccaaacatgagacaaccctgagatatgtagaaagatcccatctcaaacaacaacaaaataataactaatgaaaaatagaataaacaatccccaggccaactctgtgtgggggcacatgcttgccagtcccagaacctggaaggctgaggcaggaggattaaaaagccttggggacaccaggcttggtggcaccggtcgtaaatccagcacttgggagttaagaagcaagtgagtcacatctgtgagtctgaggctatcttggtctacgtaaccagttctagtatagccagcctgggatacatagtaaccagttctagtatagccagcctgggatacacagtaaccagttctagtatagccagcctgggatacacagtaaccagttctagtatagccagcctgggatacatagtaaccagttctagtatagccagcctgggatacatagtaaccagttctagtatagccagcctgggatacatagtaaaatcttatctcaaagctaaacccaaacccagttgttattttttgcttttttgttttttgggggtagaggagtcttattggtttgattatttggttttctgagacagagtagccctggctgtcctggaacttggattgtagaccagactggcctcaaactcagacatccgcctgcttctgcctcctgagtgctagcgtgtgccaccaccgctagacttatttttttaatgtgttttgagtattttgtgtgcatgtatgcacatgtatcatgcgcatgcagttcacgcagtggccagaagagggcttcagattccctgagccactatgtgtgtgctgggaattaaacccccacccctctgcaggcgctcttaagtgttgagccatctttctagcctggttggttttgatttttgtttgcgtatttgttgctataaggtcttatgtagctcaggctggcttcaaattaaagatacggtcttagctagccttgaacttctgacctctcttcctccagtcctccagtggagattaggggcatgttccctcccccagacctgacagcccctttgaactcaaagcctatgcacactctttctgcatcgtcagtggctcagtggctgcctgatatgcagcagagcaggctggggtcccttttcagagttgacacagaaagaaagtgacttttaggtctggcctgccacctttttggcaccttttgtttccatctcgtctgctttttaagtatgatttctgactaaactccctgagtctgactctaaaagagcttgactctcagaatggatcagcctttcccgccaagctatactctgaggaagaaatgactgatagatttagttactgttcctggggcacttgtgtttaatttaaaatgtttaaagatttatttgtttattttatgtatatgtgtactgtagacacaccagaagagggcatcggatcccactatagatggttgtgagccaccatgtggttgctgggaattgaacttaggaccctggaagagcagtcagtgctctctcaacagctgaatcatctctccagcccttaatttaaacatttaatcactttgtgtgtgtgtgcctgagtgtctgtgtgtgtgtggagagagagagagagagagagagagagagagagagagagagagagagagagaataagcaaatgagtgagactgctatagcatgcataatcagagaacaacttacaagaattgattctctctttttagtacaaaggttccatggatggaactcgagtcgatagatttggtcacaggtcccataactttctgagtcatcccaataggtgtgaatgtgtttagaacaagatgtacatcaacccaaatgaagcttggtggagtcttaaaaatgataaatttattttcattttatgtgcattggtgttttgcttacatgcatatctgtgtgagagtgctggatcctttggaactggagttatagatagctgtgagctgccatgtggttgctgggaagtgaacccaggtcctctggaagagcagccgatgctcttaaccgatgagccatgcctctagctgctgagatattttattttattttattttattttattttattttattttattttattgttaatggaaatgtctttcccaggctctctcttagcctagaactctgcttcctccaaagatgaatttctgaggtataatatggaatggcctagcttcctacacatgtccgtaagctaggaatttctccacatagtaccctgcacagaaggctcaagggaatgagcactatagatgggtcgcctgactttgtccctgagaaattcctcatcactgaggcctgggtcactctgatgatttgaatatgcttggtccaaggagtaccgctattagggggtgtggccttgttggagtgggtgtggccttgttggaggaagtgtgcccttgtgcctgtgggctttaagaccctcatcctagctccctggaagccagccttctcctgtttgccttcggaacaagatgtagaactctcagctcctcctgaaccatgcctaacatgttcctgccttgatgataatggactgaacctctgaacctgtaagccaggcccaattaaatgttgtcctttgggctggagagatggcttcgtggttaagagcactgactgctcttccaggggtcctgagttcaaatcccagcaaccacatggtggctcacaaccatctgtaatgcgatctgatgccctcttctgatgcgtctgaagacagggacagtgtactcacatacataaaataaataaataaatcttttaaaaaatgttgtccttataagagtttgccttggagccgggtgtggtggcgcacgcctttaatcccagcactagggaggcagaggcaggtggatttctgagttcgaggccagcctggtctacaaagtgagttccaggacagctagggctatacagagaaaccctgtctcgaaaaaccaaaaaaaaaaaaaaaaaaaaaaaaaaaaaaagagtttgccttggtaatggtgtctgttcacagcagtaacaccctgactgagacctttcacacatgtacctttcttgatctctggtggtggaatgcaatctaagacagggaaaccctattatctatgagtaccgctgctgaagtggggacagaggggagagaatggctgtcaccacgatgcacactcaacaacccctcacactaataataaataaattaaaaatgaaaataagatgaaaactaaaaaatatatagggcaaagagaaatagaggaagacacccatccccacctctggcctttgcatgtgctcacacacgtatgtgtacatgcacacacacacgcacacacgcacacacacacaacttacctagcatatgtgaggtcctaagctttaccataggtatggtaaaaataaagagaagataaagccatgttcactgacgtgtatagtcctatcacttgagaagcagaggtcagagttcaatgtcatatttaactgcatattgagtttgaagctagcctgggttacatgtggctcaaaacaacaacaactgaagaaaaagaagaagaagaagaagaagaagaagaagaagaagaagaagaagaagaagaagaagaggaggaggaggaggaggaggaggaggaggaggaggannnnnnnnnnnnnnnnnnnnnnnnnnnnnnnnnnnnnnnnnnnnnnnnnnnnnnnnnnnnnnnnnnnnnnnnnngggaggaagaggaaggctagagtacacccagtttaagctggccaccttggcctagtcaaactcacttggcaaactatatggcttcatgcttcctattatatttatttaatgtatatggatgtgtgaccatgcaccacttgtgtgtttgctgcccatggagtccagaagaggatattagatcccctgggactggagttacagagggttgtcatcaccatgtggtgctgggaaggaatcgaaccttggtcctctggaagagcggtcagtgctcttaaccactgagccatctctccagttctcttgattcccaactatgactttggatatgaactcttgttgtatacctaacacttaaattcctcaaaattcacatggccaccactgaattcttaatctctccattgcctagtttgctctctttttagtcattctcacctcagtgaatgacagctctgacctttatcttcatggcaaaaaaaaaaaaatctttgaatcaggagtagcctctgcaggcaccaggcaccaggcacacacacacacacacacacacacacacacatatatatggaccttaattttaaattgtgtatcaaccttggcttatctgtttcacacctcatgtgaggctatcagcaaaccctgactctcagtctgtaaagcacacatctccagcttctcccttctagcctacagccttctctccaactgcagttcaaactaccctttctgaaaacaaagctgggcttgagagatggcccaggagttaagagaatatacccggccttacagaggacctgattcaattccctgctcccacttcaggtagctcacaactgtctgtaactccagcacctctggcctccaaacacagaaccgaacacaagcaattttaaaagtaaacaaataaaaattaatttccctgatcacatctttccaatgattccttatctcactccaaacccaaaatcttgacagtaactagcaggcctctccaggtctgaccctgttccttcttaggtcttcaggttcacaaccaaccaaatcttcccttgtgaattactcctttattgatctttctgacccttccaacataccaagcatgttcctttgtcaaggtctatggacatttctgtcttttggaatgttcctcctttagatatcttggggttttgttgttgttgttttgttttgaggcagtcatactatatagcccaggctggcctggaatttaccatgtatactaggctagccttgtagcctggaattccctcagctccacttgtctctacctttcttgtattcaaactaaaagcaaggcccatgaactgcctgccactcctagctctggcctcaaattattttttaaaattatttattagatttgtttttctttgtagttcaaatgttttgcctgctcgtatatatgcgcaccacactcatacatattgattcccaaggaaccaaggttatgaatggttgtgagccaccttgtgggcgctggggaattgaacctaagtcttctacaaaagcaacaagagctcttcgatgctgatctgtagatctgctctcctggaattcttgatctccctccctcaacttccttattctaggtatatgggacagggggcggcttgctgtcacttttggctacagttaactaaagaattgaagtagaaactctgtagcaaaacacaggccttggaatagatctaggagggaggcggtgggggagggtgaaagctttgcttagacgttgggatagagagagagagagagagagagagagagagagagagagagagagagagagagaacattggagcagagctctgagttcttgggcaagcctttgaagcccaggcaggcgctaccccctcgggctgggagggtgtaacccatccatcaacctatagtagacaagggggtaacattctgtcttgggtgagtcagaagactccttggggctactactgaatgtgggggcttctctggagtccagtagttcgtctgcaacatctctggcgcctctgggtggtggccttcggtgctgcagtggaagaccggtgaggtggagggaggcgtacagctgagctcaccgccgcaggcgcatccatccctccagggcctataatttgggttccctgggctggccgcccctatcagcggcttagcaacagatgagtcacccaagaccccagccaaggcaaacatcaggggagggggaggaggaggagattcccgagtgtagcccggctttagccaccgcctcagttgcttgatttccccatctccagaggtccccactcttttatttgacactccccgcccttcagggcctcgttgttcttcccacagtgttttgctacacgtcccccctccccatccccgcaagggccggaggggccttccacttttctcatcaaaaggaagatgggccaggttgctctcatttcctccctgcagtgatggcagccccccttttttccccctctcatctaggtctcaacccttgtcaaggtctctctggttcctgcccctcctctttcttggagctggctgcgtgcttggggtattaggcaatgggtgtgcacccgcaggcctctccaggccccgcctgtcccaccgccctctagctgcctgtgggtcagtgctcaggccagacggtcggcaagagggcaccctcggccagctcaggccacccactgcctgcctgtggcctcttatcaaagagcaagacttcagagaggttagagaacagcggtatgagttcttaggtttgggacagttcaacttggggagcccccaggccactaagaagttgaacctctgggcgctataatcttccttagccccttcatcatcatcatcaccttcgtcgttattattattattgtcgttgccgctgtcgtcgtcatcatcatcatcatcggttttagagacagggtctctttatatagcctggctgtcccagaactcactacatagtagaccaggctggccttgaattcaaggagatccacctgcctctgcctcccaagtgttgggagtaaaagcatggcgcgcgcgcgcacacacacacacacacacacacacacacacacacacacacacagctctacctgccccagcttgccctagtcccttcttgacatctgactgaatgatagaactaggaggtaaagatagcattagggacaaataggaacaagacaaaatccaacgtgtgaatggaactgcagccacgggagaaacgtgaatatcctcgagatactgatgaaggatctgctaaatacccttccagggcctgggtgagtcccaggctgacaggcaggagagaggatggggcactggtgaggatcctgggttctggagtagggtagaagttactgagacagtgctggcccatctcagaagttatacatggtttggccttcttcccctaaatgggaaggagctcttgggctgccttttccctactccagaggtgggggactcagaaagagcacctcccgctgtggtctagcttagggctccagcaccctcatcaaggaagcactcaatagtaaccccagatacctaacttcctttgtactagacacctagccagggatgcctcttcaacacaaggcaagacttgcaagaatgtagaccaggggctggttgcccagccttgctgctagccaccaccaatgaagaggtggttgtggctgtgggtaccagccctgtgcttctgtttccttggggggtcggctctggatctatgtgacttgggtgcgcagggccagtcatgctgtgcttggggctgcggtctggcagggggcggggggggnnnnnnnnnnnnnnnnnnnnnnnnnnnnnnnnnnnnnnnnnnnnnnnnnnnnnnnnnnnnnnnnnnnnnnnnnnnnnnnnnnnnnnnnnnnnnnnnnnnnnnnnnncccccccccccccccgctatcctgaagttgggctcactttgggatcctctcaggcctccctcatctcttgtgcagcaaacgcgcgagcgtggagcatgcatttgggttatctcaagcattcatccaggaattccggagaggagacccctgagatctcggatgcctaccagaaaaggggagcatagggactgacaggaggtcttaggagctacccgagcttttgaccaaggccaaattctgaggccaaacctgagccctcccaaggggcaggcgtaaggctctgaggtgggcgggagccaagccacacagtggctcctcacttgcaggctcagagtgccctggtgcgcacaggctcgtgggctcttcaagagaccgtcagtaaccctaaggtcgtctagatccgtcctcagcgtgtcaaaggagcgcttcaatcacccactctcggaggcaaaggaaaacgatgaaagaccctgtcattgggaccagatcctggtcccttggggtcaccgcactctccctacagcctcgggagaccccggagcaggtgagtggaactccgaccacttgcccctggagtggggctaatcgtgatcccggcgtcctgtgtgtgtgtgtgtgtgtgtgtacacgcttggggggggagcggctgcgttctcctggtcaagtcagggggtggggtgcgggtggggtggggatgccccgggctctgggaggggccgcagttccgtcagctcgagcagaaccacccgtgagttaggtcgagcagagccaaagcccccggtgcttcgtcgcgggttcgctcgctagctatctggatcactccctcccttttaccctcccttcctcccggcgggcggccgcggcgacgccggggaagcggcagagaggagtggctgggcgctgggagaatgctgctccgccgagggggctgaacccgacagtttccccacggtttaagccccaagagccgggcccgagtgactcaaccgcgagccttgtggatcctgcacctgaaccgctggaggtaatggggcgggagagaacagggagggcagagactagacaggcacgcgggcggtcagacaagacagacagacagacagacagacagacagacagacaagcgtcccccctcaagagcacagacaacgccgagaaagccagatatagagatacctacagaataaagaagtgccttcggattcagagggcaatgagggggtggggtagaattggggtcggacccttggggactagatggtgtcgcactgcagagggagcgtgtagttagaaaaggggcgggggtagatggggaatctgtggccttggcgcagggcacctggtttccctcggggcctttgtagcccactttccccctggtgggagccgaggccagagagtggttccaagagcctgacctcggacccttctaatctagcttgcctggtattgccagcacgaggaggcaacacccctccaggtggtggggaacccccttctaatccctccctctaaccctgtaagggcgggcagatcagttgtggggcccacagagagggagcggttggtgaggagggatagagggtctgagagaaccggtctcaaatgggtatgtgagtgtcccaggaccctgcgtcgtgtctggctggctcggactccaggggtgctccggagggcctcgggctgctcagacccttcctctttgacaggttccaggacgcagacactggaagtcaaggggtgactagtattgcacagtttggggaggggtgagaaaaagctagtggggcttcattggtggcttaaggagctgaaacagagcgtccttcggtcccagggagccaatctagtcctcatcaaatgtccctgtccccgcaggcgctgactgactcgcccaccggagcctccgggcttcgacatgctggaggagccccggtctcggcctccgcccttaggcctcgcgggtctcctgttcttggctttgttcagtcggtgagcgtttttttatccagttccaggggagggaaagcaccgatctgggttagggaggatagggatggggcgtgcgactagaccccagacccttgtcgcttgtccccagggctctaagcaatgagattctgggccttaaacttcccggtgagccgccgctgacggccaacaccgtgtgcttgaccctgtccggactgagtaagcgacagctggggctgtgcctgcgcagccccgacgtgacggcgtcggcgctccaggggctgcacatcgccgttcacgagtgtcagcaccagctgcgcgaccagcgctggaactgctcggcactggagggcggcggccggctgccgcaccacagcgccatcctcaagcgcggtgagcctgacggggcggctgtgtgtgctgctgcccaggcgcggggggcaggccgaggcgcgcggaggcgggaagggaccggctcacggcttcgggaggggcctctccgggaatttccccaggagctgcgctcagctagatctggtcaccggctgggcctctgcctgcctgcctgccttccacctgcgtcgctggcgaggcagctgggtccctgcttccctaccccagggcctcccttttctgcctccacctaattcggatctgggatgcacctgtgaacaagagatgccccccaacccaagaagcttcaaacacaccccccctcaaccccctatttttctctcccctccctctccacccagacaagtccaggctggtgtccccagagtctcagcgggggtggggtgacgcccccaaccgtttaagggttaaacctgctcccctaattgctggggttcccaggagccaaagctgggaacaaagaccctgatggctttgaagctggggagtagccccctcctctgtgctgtgggggccccaggtgtccctcacctgaacaggtgaggaatggctggagggccacaaaacaggtcactgctggcctggtctagaaggaatggtccgggaggctccattgcctctccctatactcaactgaagtttactcccagaggactaatgatccacggaagggggtgggggtgggctcagtccagggatagagtagtgctttggggactatggggttaataggcagctgccatctggaggggaattcccaagacgtgtgcaaacagcttcacccttggatggttgggggatcttggggctggccctggagccctagattcccgggtaagaggggcctggcctccaaaccaactgtctttcatcttctcagaactcttgcttgcaagtgcccttgcttaaaatgaaacgagggacccccctccttctctgcagggcctgatatagtggaaggttttgatggtgaggatgtctctctaagcctgggaaagatttgtcatcccaagccccgtcctcaatgaccgccccccccccaaacataacagagaagccaaccttttaaaagggccttggggaaaatcactcctgactttctcctcctcccagtattttataaggtaatagcaggttagaataaacataaagggcaaatataaaactagaacctgggaagggggtgggcagctccagcatgctaggggttgttactgcagtggtaggtggtagtgtggtttaaagactcatttaataaggtgggggaagaaccccaaagccaaaggtgccccccaagctccctgcagagagatgcagaactcctggaacacaccttcagaagtcctcaggactctttctgaattatctcaaatccagaggtctctctaggcccgtggttcttaacctctctggagggctgagaggatattcagtgcctgagggttgatcttggggtggtcaaaagtcagatatcctgcatatcaaatatttacattatggttcacagcaaaattgcagatatgaagcagcaatgaaataattttatggttggggtcatcacaacctgagggaacttgtattatagggttatagctttaagaaagttgagaaccactgtcacaccccaaaatgacagatttacagagatttggctttagtggtatcttgacccatgggtctgaggcctggtgttatttcttgtctcaggatgctgtcccaaatcactcagctgataaatgacagagtcaggactcagaaatttctgacattggctgctgctactagtggtagttcacacctatgcgcttaggaagctgaggcaggagaattgtcaagagttcaaggccagcttgggctacatagaagatccaattggattttttttttttttttttttttttgctattagagggtggctggtgtctctttctcagcctgccatctgccttctcccctcagctccctgtcaaccttaccccaatccattttctccccaggtttccgtgagagtgctttctccttctccatgctggctgctggggtcatgcatgctgttgccacagcctgcagcctgggcaagctggtgagctgcggctgcggatggaagggtagtggtgagcaagaccggcttagagccaagctgctgcagcttcaggcactgtctcggggcaagactttccccatctcccagcccagccctgttcctggctcagtccccagccccggcccccaggacacgtgggaatggggtggctgtaaccacgacatggacttcggagagaagttctctcgggatttcttggattccagggaggctccccgggacatccaggcgagaatgcggatccacaacaacagggtgggacgccaggtgtgtgtgcttacctcggcctgggtctccttccggttccgagacagccttgctgtgagacagccttgctgtgtagtacaggctagctttagatttggaatcctcccagtctgagggctgtggctgttaggtgtggccaccgagccaggcttttctcagactttctctgtccctccctccctccctcctaaagagaggccccacagagtaatgggatgaggtttggtgagtgattttgttactagcaagcttgtcgctagtagtcacccgaaatatgtttagaatctataggaagctgcctggtggcatttaccatatgtaaatgctagcatatagcatcttagtttttttttttttttttttttttttttttttttttaatttaaggtgtatcagtgctttgcccgaatgtataggtctgggcaccatttgtgtttttggtgccctcagaggccaggagagggctttggactccctagaactggggttattgtctttttttaaatatttatttatttatttatttatgtgagtacactgttgttgtcttcagacagcactagatgaaggtattcattccatcccattacagatggttgtgagccaccatgcggttgctgggaattgaactcaggacctctagaagagcagtcggttattgttgtgagtcaccatgtgggtactggaaattgaacccaggtcctctgggagagcagcagccagtgctcttaactatctggtcacatctccagcccctcatatactgtattctatacagtgccttgtacttggctcactgcatagacattggtttttttgttttgttttttgagacagggtttctctgtgtagccctggctgtcctggaactcactggcctcgaactcagaaatccgcctgccttgcctctgcctctgcctccgcctcccaagtgctgggattaaaggcgtgtgccaccacgccccgccccgggtactgcatagacactgttacaacagctgccttgcctgacagactttaggacattctggcctacagactccattttatccatgtttattctggaaagcgctgttgtctccttgtgagctagtgatcaaagtaaatgctttcctttccgttcccttccttgctctgttcatttgcaccccctcatcgttcccctctttgtcaccctgacgttgtaggtggtaacggaaaacctgaagcggaagtgcaaatgccatggaacgtcaggcagctgccaattcaagacctgttggagggcagcgccagagttccgggccatcggggcagcactgagggagcggctgagcagagccatctttatcgatacccacaaccgcaactctggagcgttccagccccgcctacgtccgcggcgcctctctggagagctggtttactttgagaagtctcctgacttctgcgagcgagaccctactctgggctccccaggcacgagaggccgggcttgcaacaagaccagccgcctcttggatggctgtggcagcctgtgctgtggccgtgggcacaacgtgctccggcagacgcgagtggagcgctgccactgtcgtttccactggtgctgttatgtgctgtgtgatgagtgtaaagtcacagagtgggtcaatgtgtgtaaatgaaggtgagcctcgcctaggcacgacgaggaggagaagcactgtgtgagggctgctctctttcagccctttgctcggatttctgtctagggtttatcgtggctcccggaagctcagagcatctgcctgagaacagctctgggggtgtagggtcaggtgaaatctgtaacgagcagccttttgtgggggaagtggccccacactctgttcttaaacactcgaatagactaagatgaaatgcactgtactgttagcgtcttctctacctacagctccctcgggctcaggttcctacttcctttggatagggagtctatcttttggccactcctcttcctcgaaggataatagcaggcattgtgtggagtcaataagacccgtatatatagcaagagaccacctcttcctatttgtggttctcaaactcctccactacagcccagaacctcctcttatgggacctcgggtgacaataatgagaggttttcggttggaaaaggacagagggcagggaagcctcagacagctgtcttgtcaggctcttgggaggcttctccttccgttcagttgttgaaagggtctctccaaaggaaaggttttagccataactcttggaggcccttttccttcttcagcaggaagggtgggaatggataatttattttactgagatgtgttcttggttcctgtttgaaactaaaataaattaagttactgaactactggactggcagtggcagatggtgatatgtctagccacactcggggtagtagcccgtgtttttttctctttctaggtgaagtctacactcctgtactcagtgactttttatgtatatcctgctgacttccacaaaggatttgaaatgatgctcaaagactgagtttaggtttttagtctgtacaaaccaaggtggacttctgggtgtgaaggacttttagattcaaatgtacatagaccctgttcaccccgagccctaggctccagggtcaccttcaccattactcagaaccaaagctggtgcttgtctcccctgtaaagggctagatggtagatacactaggctatttatactgtggtctctatgtcgacaactcacctccaccgtacttacccagttctgctgttatagaccccaaatagttatggcagggggtgaatgaaagcagacacagacctcacataagcggatggggatagctgtgttcaacacagctcacaaagctggtgtgcagggccagaccttgccctccgactgtcacttattgaaccctttgctatactacaaggtcatgtctgcaatgggagtttcagaacttaaacttaacaattaggtggacaattaaaggacaggtactgttgtctctaagtccaaaccagagaattgggcaggggttgggggctggagggtgggggtggggtggtnnnnnnnnnnnnnnnnnnnnnnnnnnnnnnnnnnnnnnnnnnnnnnnnnnnnnnnnnnnnnnnnnnnnnnnnnnnnnnnnnnnnnnnnnnnnnnnnnnnnnnnnnnnnnnnnnnnnnnnnnnnnnnnnnnnnnnnnnnnnnnnnnnnnnnnnnnnnnnnnnnnnnnnnnnnnnnnnnnnnnnnnnnnnnnnnnnnnnnnnnnnnnnnnnnnnnnnnnnnnnnnnnnnnnnnnnnnnnnnnnnnnnnnnnnnnnnnnnnnnnnnnnnnnnnnnnnnnnnnnnnnnnnnnnnnnnnnnnnnnnnnnnnnnnnnnnnnnnnnnnnnnnnnnnnnnnnnnnnnnnnnnnnnnnnnnnnnnnnnnnnnnnnnnnnnnnnnnnnnnnnnnnnnnnnnnnnnnnnnnnnnnnggtgatgggaaaaaaattgagaggattcctatgctcaaaatgcaaaatgtgtcgtttgtcagggaagagtctcactgtgtaccccaggctagccaggcggtcagtacgtaccctaggctggcttcagactttccactgtgtctcattcttgagttctggaattgcatgtaggccttaccactcccggctaaaaattagataattttagcaaaactagcattctctgccactgaattatttgcatatacattttgtctttctttattcaatgttctttttttttgtatttaatctgagtaaaataatttctttatcttttcaatttttctacatttatttatttgtgtgtgtgtgtgtgtgtgtgtgtgtgtgtatgtgtgtgtgtatgtgtgtgtgtgcacatgcaagtggatgcaggcatactgtggaactcatatggaagtcatgggacaacgtgcagaaggcagttcaccgtttaccacttgggttccagaaactgagtttaggtcttcaggtgcggtggaagcattctgacctgacctgctgggccatcctgctgcccatcccttgtcttttcagatataagtagagagacgagattttttttttttctacaacatctccaattcctagcctaatgtctttgaaaaggagcacctttaagatgccttaaggacagaggcaggaggacttctgagttcgaggtcagcctggtctacagagtgagttccaggacagccagggctacacagagaaaccctgtcttgaaaaacaaaacaaaacaaacaaagaaagaaagatgcaatgtggaggggctggggagatggctcagtggttaagagtattggctgttcttccagaagatccaggttcagttctcagtacccacatgtcagttgacaaatatctgcaactccagttccaggggatttgacagcttcacaaggacatacaggcaacagcaccactgcacataaataaattgggactggagggatggctcagccattaagagcactgactgctcttccagaggtcctgagttcaattcccagcaaccacatggtggctcacaaccatctgtaatgagatctgatggcctcttctggtgtgtctgaagacagctacagtgtacttagatataataataaatcttgaaaaaagaaaaagaaaaagtaaataaattgcctggtgtggaagctgacttaggcagagcccggtgagttcaaggccagccttgtctataaagtgagttctaggactgccagggctgttacacagagaaaccctgtctctaaaagatagataatagatcttttttattaaaagatgcaatatggacaaaagacctttcagagcacctgcatatttggggtctataagatgctcccagggaggctggagatagcacctgctgcttttgcagagggcatggattcagttcccagcatccacatggtggctcacaaccatctgtaactccagtccaggggatctggtgcccttgatggcctctgcaggcttctgcacagccatggctcagagacatatgagggcaaaacactcatacagaaaatcaaaatatatattttattttaaaaggccaaaaacatgcttcgacggagtgcagaagtagctccctatatttctctaggtgataggttatctggtgagacaggaccaaggggaccatgaggactgttggatcatggcagtactccatggtgacattatacctttttagtgtgggaggccaggtatcgtggaactcaggaagcagagacaggcagatctctgtgagttcaaggccagcttggtctgcagagtcagttccagaacaaccagggctctatagagataccctatctcaaaaaacagaaacaaacaaacaagtttggggagggaggggtttggggagatggcttcttggtgtagagtgcttgttgctcttgcaggagacctgggtttgatttctagctctcacagttgggcagttcacaacagtctttaactccagttccaagggatcaaataccccattctgacctccagaggcactaggtatgcatgtggtacgcagacataaatgtgggcagaacatttatataagcagataaatctttaaaaatcaaaagaactatatatgtgcatatgtgcacgtatatgagtatctagaagagcgtcaggaatcccctggtgttttgcactgcctggaatggatgctgagaactgaactcaggtcctcctgaattcacccatcctctccatggcaacaacttagcgggagatgtcagacacctgctaacctaatgtgtgaatgaggagaggaagaaaggagaggggactgaagtaagatggacttggatacaaccaagaataacagggaacatccagagtgcagatgccttccctctaggaagaggcattctccagatggggctgtggcgagagagtcttttaactttccttttccctcccctgtcggtccctttgcctccctcgctttcctagcttttctttccatagcatgcacgctctgtggtggacttaagccccaaaccacaaccttgacaaattccaattggatttggtcagcagggccaacaccccctcccagcacaggcgctgggctcaggcccaggactggggtcagtggtggggtgggagtttgcaacccacagaactggtgggtggctacagtttcagcttttactgggctctggtggcagctggagggagggaaaagagcacactctggaggagccctaccttgaccaaatggctaggaagcttagagtggtggggagcagctggttacaggggagtagcacttctatccacccctgcttgtgtcaggccaacctctcctgacccttgtctccccacacaccagagggtgaaggacagaagacctgagggggtctctccagccacacccaccttttccaccataggaagctgtcagtcatttttgtcttcctttcactctgccatacatttgtgggagggctcaaggtcttcatcattaggtttcctctccttgttgaggttccacaaggcatgctgtggaagcactagggagtggggtgagcagtccataggcatacagaggcaagggagtgaggacctaacctggtggagggttatcacaaagttttaggcgagaagtggagacgttaacaatcacactaaaggcatgtcagagcacatgtcagagccgcaggaatgcataatggtcttttttttgtttgtttgttttttgagacagggtttctctgtgtagccctggctgtcctggagctcactttgtagaccaggctgtcctcgaactcagaaatccgcctgcctctgcctcccgagtgctgggattaaaggcgtgcgccaccacgcccggcttataatgttcttaaggtttctattgctgagataaacactgtgaccaaaaacaagctgaggaggaaagggttaacttcacctcacagattctatagtcactgaaggatgtcaggacaggaagtcaggataggaacctggaggctggaactgaagcagaggccatggaggagtgctccccatggctttttttttttttttttttttttttttggataaatggtcttttctgtggaagcctggctactgtcctagaacttgctacgtagaccagcctggcctcaaattcaaagaaatccacctggctctgtctcctgagtgctggaactgacagtgtaccaccgtagctggctcagcttgctttcctgatattttcccctggtattgaacttatttttatttgcatgagtattttgcctgcatgtatgcttgtgtaccacatacatactacacacagtgtccatagaggcctgaatggggcctgggactagagtcacagacagttgcctgccaccatatggatgctgtgaatcaaaccaggtccttgggaaaaagctgcctggccccttagcctctgagtgactagtcagccctcacctgcttcataaaattcaaaggtcgtgccgcccacagtgaccttggcccttccatgccaatcatcaatcgagagaaatgccttgcaggttggctcacaatctggtgaggtcatttcttgattggggcttcctcttcccaaatgattgtaacttctatcaagttgtcatcaactagccagtacagttgacctcttgtcaatatgacacacaaacacatcactattcaactagaccctttcctttctcagttaccctcaacatggcatgttataatgatataaaacattccaatgctgatgtttcccatatttgttacaaattcaaacgtataaagaaacccggtccttttagaaacatctgaagtctctcttttttttttttaagatttatttattgattatatgtaagtacactgtagctgtcttcagatactccagaagagggagtcagatctcattacggatggttgtgagccaccatgtggttgctgggatttgaactctggaccttcggaagagcagtccagtgctcttacccactgagccatctcaccagccctgaagtctcttttaaagttcaatgtttttctaaaacattcaaaatcgctgtaaaattctgaagtttcttaagcgtggagtcctgtgaaataaaaaaaaaaaaaaaaaaaaagctacatacgttattgcttcaaaaaggagaaaccaggacaatcacaaacaaagcaaagcaaaaccagagtccagcccggtaaaaaggccagcgctggggcctcctcatggttctttgggcctcaaagtgctctgtggcctcaactctgccagcttgtctcctgggcccagggcagcgctattccacagtttcttctgtccttggcagttgtcccacggtgctggcatctccaaaaggctgggtctctgctgcagctggattgtgttctcctcctctcccccctcctccccccccccccccccctgaccttgccatgtggtgacagtagaccagactggtttcaaagtcagaggtccacctggctctgcttcccaagtgctgggattaaaggcctgtgccaccaccctggactgctctttccttaatcacagctgattcttcagccccagctgtccagtatcaattaagtaaagtaaaagtttcactttagttgttctttttttgttgttgttgttgtttttttgtttttttattattattggctggggtccctctatatagccctggctggcctggaacttactatgttgatcactctggctgtgaactcacagcaatccatctgcctctaccccccagagtcctgggattaaaggtgtgagccaccacatgtgcactttagcggctcttaattcaaaatatgagacttagactctttaagggactttccaatttctccctgtaacttcccaagtcaggcctctgtcgtctgcactgctcttggcattatcttctaagtccccacagcaacccacggaactctgagcacacaacggctttcccagcccagagttcagatgccaccacaatcctccccaaaacacaaggtcaggtctgtgacagcaacatctcacgcctactgtccaaatgcaacctgaggaagaaagggtttattatagttcatcactgagttggaactcagggtaggaacctggaggcagaaacagaagcagaggccacggaagattgctgcttatacataggcttgctcagcctgatttcttatacaacatacaacccaggggtgacacctcctacagtgagcttggctttctcaaactatcactcaaagaaaatgtcccccaggcctgcttccagcccgagctgatagagcaagacattttcttaattgaggttctctcttcctgcaggactctgtaaccggagtccagctgacataaaactacctagcacagtaactatattttggggagtctcttgcctttaagaacccaggatatgggctagggagatagttcagccattaaaagtactagcaagacaagcttggcccgagcttgttccccagagcctgttgtaataggtggagggcgatcaggctcttactgacctctcttgcctagaggacctggctcccagcaccacgtggaacaactgcttgtaactttgtctccagagaatgttacatttttttctccctgtagtagatatccacacttacaggcacctactcacacacagagacgtatgtgcgtaggtacagttaaaaataaatccatttggctggatgtgtgacaaatacctttaatctaagcactcaggaggcagaggcaggcagatcgtatttgagttcaatgccaacttggtctataaagtgaattccaggccaggtggggctacatagtgagcccctgtctcaaacacaacaataacaaatatatatattttaaagctggatgcctgtggtgtaatgaaagcattcctaaagtaagatgggggatgatgccaggagaatcacacagagctagcctagagtgtgcactgcagcagcagaaaccagagatcctggcccaacgagggaaaaaagtcaagaacagcgactcccaaaaggtgtcctctctaacctccacatcttgctagagcacaagtgcacccgcaatctctcatacaagcacacacacacagagttaataaatggagggaaaaacgagcaaaaaccagagcttaacaaaggctctcaacagcattgagtcctgagtggggacaaatataattctcttcgttataagcaagttccttgctgtccatctcttcgttaaccatctctggctgttctggagcctgctctgtaaatcagactgacctttaactcacagacatccacctgcctctgcaccctagtctccagtgctgggattaaaagcttgtgccaccaccgcccccagccagtcctgtaatttttgaggtaaacaagagaagacaaactggtataaaggtataaaccagagacagatgtgacaagagatagattctgttcccagcctatgttttggagggagagaagagttataacgctgcaccaagctcttatacttgatgcatttaaagaacgcagtgggggctggtgagatggctcagtgggtaagagcacccgtttctggcgaggacccttctagctcagattctaacatagcttgtggctagagtctcaggcagtgtctccatcatgtcaaaagatgagtgtcagggaaggaaggcggggtcctgggtgcgctttcctggggatactaaaatccagactcatctagagagacttcatgagagccgcctctgagtttctgccctctgcctttcagcctcaacctcctagacgaccccatccagatgtttcctctagtatctggaatgcatcgttctttctcctcttcctttatgggaaaggatctcagagaaagcatccttaggaactagggagcagagcggattagcaggtggggtgcgagtgatgcgctgtttatttggaataagactggactagagcaggatacagcaaccgttttcatcctccatgctccacatgggctctgcttaagaaaccccggagactccctggtccgagccctgtggccagcgcagccaggatgtggcaaggtcccggagctcgctctgctcgggagcctcacctcagtgcccacagccccctctacacgccgtgccttccgatcctccagcccccacacaggcccccgcctaggctcagcttcagcaccggctgcttttgctgcagccgctgccatggtgatgggtctcgcgagaactgccgctcgctaccgcgcacttctcgcgcgatcgtggaggtgggaagtagcccgggctgggggtgggtgttcgccgcacagctcctgtcgccgtcgcggcttccggtgctaggtggagggcgggcaggagggagccggggagcgggccagcggaccatcttcaccgcggtcgggtcggcttgcggagcgggaggcagcggccggagagccgggcggaacctgcgggggcggaggcggcggtggcagccgcggcgcagggagcaggaacaggttcggagctggggagggaaggcgggtccgggcagggaagaggctgggtccgggtgggagcccgaggcccccggccgcggtccggctcgcaccgtctgggcgaggtgctggtgtggggggtgatcctcgctgagcttggggaccccagccccactcctgtccccgcagccgaaggacgccgagctggggtgggggcggggggcgcacacggatttgtcctccgcctcccccgagggtgcgacctgggctgcagaggtgagcttgggagggttggggacgagggggaggcaggctgacctgtgggagggggacgcgggggcggtgtggctgtttggctctcttttccttgggtttaaagggctgcgaggaacgctgccttttctctctccctcccccgcccgagctgtgggggaaccaaagaaaagccgtgccgtgccgtggttattctcctccctcacccagcgcgaggcgtggggggccggggcttagtatcagggcctactggtggggctcggctggctgcgcacggtcctcacggaggtggcgctctgctctggggtgttgggaagagggcagcaggtggggagagggtggagaggaggctggagacgggggagggggacctgagctagctcggaggagagaggtggggccttcctcccccaggcggagcgggggcggtgtcaccgaaggagggagcagcttgtcactggccctgagtttgtgtcttccaatccgctttctttctctaggaagtaccaggattcccggaacagaaaatgaagcctttgcttagcatgccagtcctttttgaaggaaggagggggaggtggggaggtgaagttccc

SEQ ID NO: 1345 - DNA, 1223 bp, Mus musculus
ctcgagcagaaccacccgtgagttaggtcgagcagagccaaagcccccggtgcttcgtcgcgggttcgctcgctagctatctggatcactccctcccttttaccctcccttcctcccggcgggcggccgcggcgacgccggggaagcggcagagaggagtggctgggcgctgggagaatgctgctccgccgagggggctgaacccgacagtttccccacggtttaagccccaagagccgggcccgagtgactcaaccgcgagccttgtggatcctgcacctgaaccgctggaggcgctgactgactcgcccaccggagcctccgggcttcgacatgctggaggagccccggtctcggcctccgcccttaggcctcgcgggtctcctgttcttggctttgttcagtcgggctctaagcaatgagattctgggccttaaacttcccggtgagccgccgctgacggccaacaccgtgtgcttgaccctgtccggactgagtaagcgacagctggggctgtgcctgcgcagccccgacgtgacggcgtcggcgctccaggggctgcacatcgccgttcacgagtgtcagcaccagctgcgcgaccagcgctggaactgctcggcactggagggcggcggccggctgccgcaccacagcgccatcctcaagcgcggtttccgtgagagtgctttctccttctccatgctggctgctggggtcatgcatgctgttgccacagcctgcagcctgggcaagctgtctctacctacagctccctcgggctcaggttcctacttcctttggatagggagtctatcttttggccactcctcttcctcgaaggataatagcaggcattgtgtggagtcaataagacccgtatatatagcaagagaccacctcttcctatttgtggttctcaaactcctccactacagcccagaacctcctcttatgggacctcgggtgacaataatgagaggttttcggttggaaaaggacagagggcagggaagcctcagacagctgtcttgtcaggctcttgggaggcttctccttccgttcagttgttgaaagggtctctccaaaggaaaggttttagccataactcttggaggcccttttccttcttcagcaggaagggtgggaatggataatttattttactgagatgtgttcttggttcctgtttgaaactaaaataaattaagttactgaactactgg

SEQ ID NO: 1346 - protein, 245 aa, Mus musculus
MLEEPRSRPPPLGLAGLLFLALFSRALSNEILGLKLPGEPPLTANTVCLTLSGLSKRQLGLCLRSPDVTASALQGLHIAVHECQHQLRDQRWNCSALEGGGRLPHHSAILKRGFRESAFSFSMLAAGVMHAVATACSLGKLSLPTAPSGSGSYFLWIGSLSFGHSSSSKDNSRHCVESIRPVYIARDHLFLFVVLKLLHYSPEPPLMGPRVTIMRGFRLEKDRGQGSLRQLSCQALGRLLLPFSC

SEQ ID NO: 1347 - DNA, 2217 bp, Mus musculus
ctcgagcagaaccacccgtgagttaggtcgagcagagccaaagcccccggtgcttcgtcgcgggttcgctcgctagctatctggatcactccctcccttttaccctcccttcctcccggcgggcggccgcggcgacgccggggaagcggcagagaggagtggctgggcgctgggagaatgctgctccgccgagggggctgaacccgacagtttccccacggtttaagccccaagagccgggcccgagtgactcaaccgcgagccttgtggatcctgcacctgaaccgctggaggcgctgactgactcgcccaccggagcctccgggcttcgacatgctggaggagccccggtctcggcctccgcccttaggcctcgcgggtctcctgttcttggctttgttcagtcgggctctaagcaatgagattctgggccttaaacttcccggtgagccgccgctgacggccaacaccgtgtgcttgaccctgtccggactgagtaagcgacagctggggctgtgcctgcgcagccccgacgtgacggcgtcggcgctccaggggctgcacatcgccgttcacgagtgtcagcaccagctgcgcgaccagcgctggaactgctcggcactggagggcggcggccggctgccgcaccacagcgccatcctcaagcgcggtttccgtgagagtgctttctccttctccatgctggctgctggggtcatgcatgctgttgccacagcctgcagcctgggcaagctggtgagctgcggctgcggatggaagggtagtggtgagcaagaccggcttagagccaagctgctgcagcttcaggcactgtctcggggcaagactttccccatctcccagcccagccctgttcctggctcagtccccagccccggcccccaggacacgtgggaatggggtggctgtaaccacgacatggacttcggagagaagttctctcgggatttcttggattccagggaggctccccgggacatccaggcgagaatgcggatccacaacaacagggtgggacgccaggtggtaacggaaaacctgaagcggaagtgcaaatgccatggaacgtcaggcagctgccaattcaagacctgttggagggcagcgccagagttccgggccatcggggcagcactgagggagcggctgagcagagccatctttatcgatacccacaaccgcaactctggagcgttccagccccgcctacgtccgcggcgcctctctggagagctggtttactttgagaagtctcctgacttctgcgagcgagaccctactctgggctccccaggcacgagaggccgggcttgcaacaagaccagccgcctcttggatggctgtggcagcctgtgctgtggccgtgggcacaacgtgctccggcagacgcgagtggagcgctgccactgtcgtttccactggtgctgttatgtgctgtgtgatgagtgtaaagtcacagagtgggtcaatgtgtgtaaatgaaggtgagcctcgcctaggcacgacgaggaggagaagcactgtgtgagggctgctctctttcagccctttgctcggatttctgtctagggtttatcgtggctcccggaagctcagagcatctgcctgagaacagctctgggggtgtagggtcaggtgaaatctgtaacgagcagccttttgtgggggaagtggccccacactctgttcttaaacactcgaatagactaagatgaaatgcactgtactgttagcgtcttctctacctacagctccctcgggctcaggttcctacttcctttggatagggagtctatcttttggccactcctcttcctcgaaggataatagcaggcattgtgtggagtcaataagacccgtatatatagcaagagaccacctcttcctatttgtggttctcaaactcctccactacagcccagaacctcctcttatgggacctcgggtgacaataatgagaggttttcggttggaaaaggacagagggcagggaagcctcagacagctgtcttgtcaggctcttgggaggcttctccttccgttcagttgttgaaagggtctctccaaaggaaaggttttagccataactcttggaggcccttttccttcttcagcaggaagggtgggaatggataatttattttactgagatgtgttcttggttcctgtttgaaactaaaataaattaagttactg

SEQ ID NO: 1348 - protein, 389 aa, Mus musculus
MLEEPRSRPPPLGLAGLLFLALFSRALSNEILGLKLPGEPPLTANTVCLTLSGLSKRQLGLCLRSPDVTASALQGLHIAVHECQHQLRDQRWNCSALEGGGRLPHHSAILKRGFRESAFSFSMLAAGVMHAVATACSLGKLVSCGCGWKGSGEQDRLRAKLLQLQALSRGKTFPISQPSPVPGSVPSPGPQDTWEWGGCNHDMDFGEKFSRDFLDSREAPRDIQARMRIHNNRVGRQVVTENLKRKCKCHGTSGSCQFKTCWRAAPEFRAIGAALRERLSRAIFIDTHNRNSGAFQPRLRPRRLSGELVYFEKSPDFCERDPTLGSPGTRGRACNKTSRLLDGCGSLCCGRGHNVLRQTRVERCHCRFHWCCYVLCDECKVTEWVNVCK

SEQ ID NO: 1349 - DNA, 26429 bp, Homo sapiens
  misc_feature (1)...(26429): n = A,T,C or G
agtgggagagatgggatgcgtatgaaccgcggggagtgtgactggaggtactcgggtgggcgaataaccgggtcttgagtgctagcgagtctgtttgggggagggctcgaggagagcgttcctgggggcgagtccgcgcagcgcctcacagacactcgtgcagtacgcgcgtgtgcgtgcagttgcggcagctgacgtggcagcaccagtggaaggtgcagttgcagcgctcggtgacgcgctgcgtgcgcgtgcggtggcccctgccgcagcagagcagctcgcagccgtccagcgcgggcgacgagctgttacaggcgcgccctgccgtgcctgctgtgcccaggcgtccgctgtacgtgcagaagttgggcgatttctcgaagtagacgaggtcgtggggggagggcggtttgtgggccgggtcttccggctccaggcgcagcagctccgcccgcgaagcgcggttgctgccgcggttgccgtacaggacgcgcgaggcgccgtcgaagcggtcgcgcagcacatcgcccacggcgcgcagcgtgggcagccgcatccagcacgtgcgcaccgtgcatgagccggacatcccgtggcacttgcactcctggcgcatctcggagaatacggtctgcggggataggggaagaaagagtgtcccagggcaccgggccagagtcaccctcccagacactgccctctcccggacgccacgggggccggacctcagcaaaggcccaggcctagctgagcccaggggaagggaggcgcgaaatgttccgctgagatttggaaaccctgcccaaccctgctccgccgcggcgagtcagtctcggcctctcaggcttatttttcgaatctgtacagcgaagagactgtgcttgatttgcaacctcttctacctgtccgcgggccagacatacctttgccctcagccactgtctcctctattctccgtcttcgttccaagcctccggctctcccaggacgccctctcctggtgccccttgccttatctcaccgaccgtcacttccccagcccgaggttggcccctgccgctccgcttagggtgcggagcctctcaaagctcaccgtacggcctgcctcgttgttgtgaaggttcatgaggaagcgcaggtcccgccccttctccccggagtccacgaactcccggccgaagaggcggccgaagtcaatgttgtcgctgcagcccccccagtgccagtcggggcccccggggccgcgccgccggtagtcacacgtgcaggattcgatggaaccttctgagcaggagcgcgccaccgaatgggtgaccccggcggaggtgatagcgaagataaacgccgtttctcgacagcctgtgggagaagggagcggggatcagcgagggggtacgcggggcgcggccagcaccctcatgaagggcttgggaccggaatcccacccccgactccgcactttgagtcctgagagccagggccggcagtgctggaaagctggtctctagggctagtagagaaagcaggtgcgtgggcacgcagccacgtccacgggcgtaatcacaccttactgggagattctagggcgcattttggctcgatagcggaagtggagcagccccagagagacaaaccgaagagaggggagcggaagaaccatacatccccaagacttcttcgcagcccaaaactttcggcccattttggcggtgcaagccttgctgggcgagaggccagacacacgcctgcagagagcagcttcccaggcgcttttgagagaggctgggggaaagcggcggtcagccggcgtccgcgacccgaaactttctttatctggggcagtagctcagaaaagttaagcttcgtttccagggtgcacggctggaaaacgcctggtagaagtctggccccgagctggcgctgggcacgaggcacttggcaaggttgattgtgtgaccctccaggcgcctgggacaccttctctgaactcgcccgcccatgccctgggggtgaccccgcgtttcccctgctcccggaagcgtcgccttcctgggcacccacctcggttgacgatcttgccgaagaggtggggccctggagcagtgggacagttccagcggcgattccggaactgccacttgcactcgcgcacggcactctgcagccccccactcacgctgtgcaggatccccggattttggcgtatcagacgccgctgtttgcggctcaacagctgcagactgggctcgagtaccagttgcagactcttggagtctgtaagcaggttcgtggaggaggctacgttcacaatacccctggtgggacgtatgatagctcaggctcaggaaggggatccgcaccctaaccataaaaactgtgccacccggtcctcttcctgggggtatgtggctggagagaatggcgggagattaataatacccgctctcccaggctcactaatttgaaagaactgggcgtccagacttgtgtgtgcccagtagtcccagggctgctcgcctgagccctaggtccggagactggacagaggaggtacccggagaccgagtgtctaccttggatctccgagcctcttccggtcagcctgagcgagataatcatggcctgcagttcttgcccacccaaggcgtgaaatgcttaggagtcccaccctcttctcccctcctttctaggcgaactcctggcccttcacttcccgaggtggggaaacctgtggtgagccaccgccgtgaggctggagttggcgctcaaaggggaagggcggtgctagatgagagtgggctccctgcctggggtatcttaggcctccgcgggcggatcattcgccccacttgtacagagctggagtctggggcagtttcatgccagatcgcccttcggtgtcgcggagggaagtcagagcggggagggagcctgtcggcagacggatcccagagcgtgggagctgggtagggttggcccctggctctgtgccgcgggacaagtggcgaccccgcaccagctcacttaccaccatcggccactgctgttggcagccagggctgcgggcagagcggccagcgccagcagcagcgtagcagaaacccagccaggcaacagcgcccagagccccatggcctgcctggctttgcccgctctgtgctgcagttgcggcgactttggttgttgcccgcgacggtgggacgggacgcggcggtggcggcagtggcgagagttcgcagtctggctttaacaaccctgggggcgggcggcggacagcatggctcgcggtcccggctggtgggctgaggcggccacggcgggcggcaccgcctcttatagttgcggcgctggctgaagtgacgggaggaggctgcccctccgggccgcactgtggcaccagggcgcaccggttaggggcgcagacaatgggcagcgagcggggctgtggttcccgcccgtctgagccgagagctgacgggttggccgtcggggctcacccccgccccctgcccggtggcccccgcctccgggcctgcactggccgcggacccctccccttgggacaccctcccacgcgcgcccgcctcactcagctgagcgtccggagcccgtcgaggactagcatccgccagggggcgcggcgagagtgtgctgcggggagagcccgccaggggcccagcccgcctcgccgcccgcggtggggttgtcccctcgacgtcaccccgggcccctccgacgtcccctctctcccccatcctgagtgtcggaaggaaagctgtggttctgggcagcgactccggggagatgcttaaccgcccaggaacccccgatggctggacagagaaggaaaaaggggagacgggggcgtgagtgcggctgtggtcagggaaatcccggggatgagttgtgggggtgagctaaccaaaaggagcctagcggtggagagaaacctaaagcaacaggcagtttgctcatgtgcgccagaagaagcgcacaagtggctgtgtgtgtgtgtgtgtgtgtgtgaagtggaacaacgtgaatatgggtgggagtgagaatgtgctgtgttctgagggtgcatcctcctgtgtgttggtacgtgcagaaactccttgttctgacgaaggatgttaggaaactttccaaagaattttggaatttagctcaagtcagaaaaggtcatggagtcaccttgtcacagtcaccgcctggggcagtgtgtcaggaaggaggtggcaactgtcgacaggagactcagaagcatgattgagggatgcagagtgtctggactgtgtgtggagtgggtggatgagcatgtgcatgggaagattaaatatgtgtgtatgcgtcattctgttgccctttgtacctcgtggcatcctatggcgtgtcacactgtggtatgtgtcaaccagtgcatgtcattgggggagagagccgagcctacaaccaagatggtattgaggtgaacccagcctggagtggctaagtctctgaggcctaggctcagaaaggatgggaaatggtgcggatgtccactgtatgtatggtgatggagaggactgggaagacaagggttgctggctacattgaacctagatgaggaaacttgtgcctccatgtgtttgcttctctttggatgtttctgccaagtttctgtctttccctaaagctctagttcccaccacactgggatacccagagtgcctgtgaccatctcatccattgtacacttttctcttctctcccagggactcctactcagcttcaaggccatttaggcctcctattgaagaagtgacaggctgggcgcggtggctcatgcctataatccccgcactttgggaggccgaggcaggtggatcatgaggtcaggagatcgagaccatcctggccaacatagtggaatcccatctctaataaaaatacaaaaattagctgagtgtggtggcgcacacctgtagtcccagctactcaggaggctgaggcaggagaatggcttgaacctgggaggtggagattgcagtgagccgagatcacgccattgcactccagtctgggctacagagcaagacttcatctgaaaaaaaaaaaaaaagtggctgcttttccctatatggggaatagggggcactgccagcctggttatcatgccccaccaccacacacatggcccctggaaggagggaagatctcttctctctccccattttgcagaattaaaaatagatcaggcacttgtccaaggtccacgtctaataaatgaatcaatggtagagccagattaaaacccagaccaatttgactcaaagcccatgctctttcgaccttaccagctgcttgccagtgtgcagcaattacaggctgggaacccttctcaaaattgatgggtaaaaataattttttgggcctttctgcctcccttttgagttctagctctcatttttttcatctcccttgtcttttaggatgccttctgactgagaaatttccccaggcctgaacctaaagtctcaagtcccagaaatgactaggattcccttctaaggcagggaaatcactctaaggaataaatgccaggtaagtttcattaatattcccgggcacttgtgttttaaatgagatgcatattaacccaaatgaagcctgatggaagttattttagaaagaaatgtccttctttcccttttttcttcccttttgcccagcctagtatatctggcccttccaaggatccaccccagagggaaaaggtgtagtggtccagcaccctccgtagatccaaaagccagtagtccctgcagagagcacccagcatagatagctcaagtaaatggacaatgtatcacggggagcctgtcctttatcccttatgagtttcttcccactggggcctgggtcacatcttttggcctggtggattgatacaacaccgtgagggtgggaggctggctggaaaatatggaagccctgtctttgacgactgttgtcaagcagaggtgggaagagaggaaaggagccactgtgctttgttccaacattccacacaccaggagtagggggcaagagggtaaggcccctagatctgggtcacactgtttatgacctggctgacatttctttttcaaaatatgaaatgcttcacaaatttgcatgtcatccttgtgcaggggccatgctaatctctatatcattccaattttagtatatgtgctgccaaaacaagcacccaactttctatttagatcaaataatcatgatatcaactgtcccctctttctttcctgcatcatccacttatctctctcctggaacatacacataagcatgcagacatgctgcaatagtacccatctgaaaaacccaaaaacttcattagaccccacattactgcccaagattgctccatttcagtgctccattttactgcaaaaatcaaaagggttgatttaattactagagccaatttctttctttctttctttctttttttttttttttgagacggagttttgctcttgttgtgcagactggagtgcagtggtatgatctcggctcactgtaacctccaccttccggtttcaagcgattctcctgcctcagcgtaccgagtagctgggattacaggcgcccaccaacactcccacctaatttttgtatttttagtagaggtggggtttcaccatgttggccaggctggtctcgaactcctgacctcgtgatctgcccacgtcggcctcccaaagtactgggattacaggcatgagccactgcgcccagcccagagccatctttcctaaaacagaagtctgattagttcatttctctgctcaaaattttccagcgagaccccatgtcactcaaagtaaaggggcctccttcctagccctccagcttcattgcctaccactctcttccttgcgaatttctccccactagcctcactggcctcttttctaatcctttgaaccaagcatgctcctttctaagggtctgtgcacctgcttttctgtcttctaaaatgctcttcctcagatctctccatgtatttgttccttcagtttgttttccctccccctttataaaatagaatcccactactaatctcctttaccctgcttcatttttctctgtatcagttttgaccgtggatgactttaaaggcttgaagttgaaaatcagtagcaaaccacccccctggaatagggttagaggtgagatgttagaggggagaggggctttgccttgactttgggatctggggaggaagcagggctccagggtttagagtttgtgggcagaggagcctaccctcctttgaagcacccgcaggcagcactgcccccttgggctgggaaggcacagcccatccattaggcctgagtacagaagggggcaaaattctgtctaaggtaatcccatggatttgttggagtggactgctgaaagtggggccttcctgagagtccagtatgcagtcggcccgcagaccctttggtgcctccaggtggtggcctacggtgctgcagcagaaggcgcattaagcggagggtgggcagcgcagctgagctcaccgccacgggcgcatccatccctcctgggcctataatttgggttccccgggtctggcctcccctatcagcggctcagcaacagatgagtcacccgggaccccgggccaaggcaaacatggggggaggaggaggaggaggcttctgaggctttagccaccgcctcagttgctcgacatcccccaatctccaggggcccccactcttttctttgacccccgccctccagggccccagtgttcttcccacattgctctcgttacaccctccatccctaggatgggaagggcagccctccactcttctcattgaggggaaggggaaccagcttgctcctagtccctccctgcagtgatgaaagccccccactttccccctcctgtcattggccctgacccacgtcaaggtctctctggttcccgtccctcccctttcttggagctggccgcgtgcttggggtattaggcaatgggtgtgcacccacagccctctccaggccccgcctgtcccaccgccctctagccgcctgcgggtcagtgctcaggccagccggtcgggctgagggcactgcgggccagctcaggccacccagtctgccggcctgtggcctcttgtcccagagttgggcttcagtagagagaaggagcaggactctgggtccttggatttggaacagtcctgcttggggagacctagggtcaccaggaagttgaaacctattgtagtagttctgcccctcgccccttcttggcacctggctgtatgctggagcctgacaagggtagaatcagaaggcaaaaaataatcccaaacctaagggggacccagagacacatggagaaatacaaatgtccatgaggtccccatggagaagagaggcttaggcaacctcattcccctcttccaaggacctggcaggaatcccagggtgactgcaagaaaaaggataaggacactggtggggatcatgaatccaggtgtaaggatgaaaactatgagatggggcttgcagattctggtgacctccaaaaccacacatggtttggctcttgtcctctaaatgggaaggagggtcaggaactctagtgctcccacttccccatcccagaggtagggaatcagagaaaagcagtctggtccaggctgtccagtgtcagggaccatggcactttcacctccccagactgctcacagcctggcacgtaaaggtgatctgtaaatatcccaacagatgtaagtttgctcgatctcctgtctcagactgctgtgcccgctatccaacagtgacccctgcagcacgggcaggacctccagcagcacagactggaggctggctgcccagcagagctgcaacgccaccaccaaggaagaggtgactgtggttgtgggtatcatccctgttcctctgcttgcttgggggcagtctgagtcaatgtgcctggggcgcgtggggccagccgtgccttgggctgcggtctggcaggggcggggggcggctggaaagcctggggcccctctctggcaaaaatagcccacagtggttagagcttcgagggtgagtcaggcgggagcacggtggcgcctaacccgttcgctgccactgggtctccctaaggcggtttgcctttgcctgtgcaccccaagaccaggctctttcccggctgcccttgggcttggctcaattttggatcccaaggccctcctcatcccataagaagcaagtctacagcttggagcaggaatccaggccacccaaagtgcagaccgggggaatcccgagaagggtaggatacctctgttggcaagcatccctgccaggcaaggaagcatcggggcaggctgacaatctttggtgctacttgaacctctgctagggccaaactctgaggccaaagctgtcccctccaaaggggcaggcgcagggcttggaggagggtgggaaccaagctgcccagacgtgtgcttctcctgcccgctctgagtaccccgggtgcgctcaggctgtgggtgccacatgtgactgtcccacaccgagaagcccaaagactgtctggctccatcctcatcttgtcaaaggcaccttccagccaccctgatcttggtggagaaactgacgcaaagaggagtgatgaaagatgtggccatctgggccccattctggctccctaggaaggttactacaccctccctgcagccttggcgaccccagatcaggtgagaggaactctggccacctccttcttcagtggggccaagcctgaacccaggcgtcgggggagagggtgtgtgagagagagagagtgtgtgtgtgtgtgtgtgtgtgtgtgtgtgtgcgcgcgcgcgcgcgcgcgcgctgggaggagggggaggctgcattcgcctggtcaaggctgggagtggagggtagggtggggaagccccaggctcggggaggggctgcagctccgtcagcccggcagagccaccctgagctcggtgagagcaaagccagagcccccagtcctttgctcgccggcttgctagctctctcgatcactccctcccttcctccctcccttcctcccggcggccgcggcggcgctggggaagcggtgaagaggagtggcccggccctggaagaatgcggctctgacaaggggacagaacccagcgcagtctccccacggtttaagcagcactagtgaagcccaggcaacccaaccgtgcctgtctcggaccccgcacccaaaccactggaggtaattagacctgggaaagcagggagggcagggacgtgcacacgaggaagagacaggcacgtgtgtagtcagacagacagacagacacgcatccacccacagaagcacagagacgcatagagagccagagatattgctagagataaagacacagagaataaaggagtgcccccagatttagaatgcaatgaatgtgagagccaaggggtgaggaccagacgggcgactatggaggaggggagcttgtagttaggcaaggtgggggatagggaagaggactcagtctgtgccacggtcccttttaggagggagccaggctctcctccccatctttcctgcacctggagcctctcctctttccttgctgctcagggagggggcagtgtgagtggggaactcattcttagacctttctcatggagcctacttgcccttgatgacacctggaggtgacacccccttaggtggtggggaacctcctccctatccctctccctagccctgtgagggcggggaagctagtcgtggggccctggaaaagggagcagtaggcgaggttgtggagcaagtgtttgtgagtctgtgtgtctgagtttgcaagtgagtgtgtgtctgtgtgccgggcgttgtgtctgattgggcaaggttccaggggtgctcgcttgagtcctgagctgggacaacgccttgactcttcttctttaagacctccaagcctcagggactctgggaatcaaggggtgtttcttcttgttttgtttgaggaggaatgagaagggtcagtagggtggcaccggtgggttaggagcccgaagaagggcgtcacttggttccccaagcgagccgccctattcctgaacccgcatcaagtctcccgtcccgcaggtcctgatcgatctgcccaccggagcctccgggcttcgacatgctggaggagccccggccgcggcctccgccctcgggcctcgcgggtctcctgttcctggcgttgtgcagtcggtgagcagttccccttgtctcccaggccatagaaacaccgacccggggtggggagagttggaggggtctggaccgcagaccccagacgccttcttggttcccagggctctaagcaatgagattctgggcctgaagttgcctggcgagccgccgctgacggccaacaccgtgtgcttgacgctgtccggcctgagcaagcggcagctaggcctgtgcctgcgcaaccccgacgtgacggcgtccgcgcttcagggtctgcacatcgcggtccacgagtgtcagcaccagctgcgcgaccagcgctggaactgctccgcgcttgagggcggcggccgcctgccgcaccacagcgccatcctcaagcgcggtgagcctggctgggcgggtcggcgctgccgcggaggctagggggtgggcggcagggcgaggcgcgcggaggcgggaagggatggtttcgcggctccgggaggggcctctcctggaattccccgccccccccggagccgctctgagccaggtctggccactcgtctgggcccctgcgcgcctaacttccacctgcgtgctgccagcgaggcagctgggtccctgctctcctaccctagggcccccctttcctgcctccgctcagcttaatctgggttgcacctgtgaacaagagatgcccccagtcctggaagcttcaaacgcccccctattccctccaccattttctctccccccatcttggctggacaagcccaggctggtgtccccagtgtctcagcgggggtggggtgacgcccccaaccgtttaagggttaaatctgctcccctaattgctggggttcccaggagccaaagctgggaacaaagaccctgatgactttgaagctggggagccagtcccctcctctgtgctgtgggggctccaggtgttgctcacctgagcaggtgaagaacggctggagaggcagagaacaggtcactgctggcctggtctgggaggcatggctgcctctcctggtttcccactggagttcactccctgaggtgtaaagacccatgggggctcagcccagagatgggggcagtgctctggggactatggggttaataggcagctgccatctgcaggggaattcccaagacttgtgcaaacagcttcacccctggagggttggagttagggggatcagaaggctggcccaggagccctagatcctggggtagcagaggcctggtctctaagcgggtgctgtctctcgtcttctcagggctccggagagcccctgcctaaaatgaagtgagggtccccctccttccccacagggcctggtgtaggggaaggcttggacacccaaatggtgagcatgtttatttaagtctgggaaaggcttggcagcctgagcttctgtgacccccaaaacataacaaagaagccaaccttttaagagggccttagggaaaatcactccccaacctctctcctcctctcagtgttttatagggtaatagcaggttaggataaacataaaaagggcagtcttgaagggcaaatataaaactacatcttgggaagcggaagggcagctccatagctccagtgctttgggggtgctaggatggtggtaggtaggttggttaaaagactgattaaccctgaagtgaatttaaaaaaaaaaaaacaaaaaaacagaaccacaaaggctctgctcccacctcacccacccaagctccctgcagggttgggggaatttctaaggctttcagatgtagaactcggttgtacacatcttcaaagacctcagggactccctcttagtcatctcccgactccaggggtctctccctgtgggctagctctttcatctacacctgaaaatcacagacttacagaatgagaatgggcctcagagatcatcttgacccatcgtctcctgcctccctttagaaatgaagaatctgaggctctgtgctttttgtacccttccttgtcccatgactttcctccaaatcactcagctggtgaatggcagggtcaggattcagttaggaatttctggagttggaggggggctgtttatttctttctgcctccacactctcagctgcctgtcaaccttacctccaccatcacacccttctcatccccaggtttccgagaaagtgctttttccttctccatgctggctgctggggtcatgcacgcagtagccacggcctgcagcctgggcaagctggtgagctgtggctgtggctggaagggcagtggtgagcaggatcggctgagggccaaactgctgcagctgcaggcactgtcccgaggcaagagtttcccccactctctgcccagccctggccctggctcaagccccagccctggcccccaggacacatgggaatggggtggctgtaaccatgacatggactttggagagaagttctctcgggatttcttggattccagggaagctccccgggacatccaggcacgaatgcgaatccacaacaacagggtggggcgccaggtatgtgtgtacatcttgtcctgggtctccccagcttttgaggcctggttagagtttgagaggcatagggaaatgataggataaagtgtgatgagtgactgacactcaccatcagcaagtcacccagcctcagttttgtatctgtaaagaacctaatgatacttatcttacaatgttattaagactgagctagcaggccagtgtggtggctcacgcctataatttcagcacttttggaggctgaggggggaggattgcttgaggccaggagttcaagaacagcctgagcaacgttgtgagaccccatctctatatttaaaaaaattatacatataaaaacagactgggccgggcgcggtggctcatgtctgtaatcccagcactttgggaggctgaggcaggcagatcacctgaggtcaagagttccagaccaccctggccaaggtggagaaaccccatctctattaaaagtacaaaaattaggccgggtgcagtggctcacacctgtaatcccagcactttgggaggccgaggcgggtggatcaagaggtgaggagatcgagaccatcctggctaacatgggaaaccctgtctctattaaaaacacaaaaaattacccgggcatggtggcatgtccctgtagtcccagctactggggagactgaggcaggagaatcgcttgaacctgggaggcagaggttgcagtgagcctagatcgtgccactgcactccagcctgggcgacagagcaagactccctctcaaaaaaaaaaaaaaaaagacaaaaattagccaggcgtggtggcctgcgcctgtaatcccagctactcagtaggctgaggcaggagaatcgcttgaacctgggaggcggaggttgcagtgagccgagatggcaccactgcactccagcctgggcgacaagagcaaggctccgtctcaaaaaacaaaaacaaacaaaaaaacagactgagctagcaaatagtatacccagcatagtgcctcatcgttggctgactgcatagtagctcttattacagctaccttccctacagaatttaggcatgctgtgggccagactcccaattttataagtgcttacaatggaaagagcactggattgggagtcaggacaacttgagttgagtcttggctctattactagctgttgatggaagatggacaaatcacactgctctgtcttcaattctgccatcataaaatgaggaagttggctattagctaactgcaatgtcctttctgttctgatataccatgttattcttgcctccatttgtccctccctgtgttctctgttcccttccctctcctgtgcctctgtgttctgtccatttgctgccctctgcttcacctcttttccccctgatgctctaggtggtaactgaaaacctgaagcggaaatgcaagtgtcatggcacatcaggcagctgccagttcaagacatgctggagggcggccccagagttccgggcagtgggggcggcgttgagggagcggctgggccgggccatcttcattgatacccacaaccgcaattctggagccttccagccccgtctgcgtccccgtcgcctctcaggagagctggtctactttgagaagtctcctgacttctgtgagcgagaccccactatgggctccccagggacaaggggccgggcctgcaacaagaccagccgcctgttggatggctgtggcagcctgtgctgtggccgtgggcacaacgtgctccggcagacacgagttgagcgctgccattgccgcttccactggtgctgctatgtgctgtgtgatgagtgcaaggttacagagtgggtgaatgtgtgtaagtgagggtcagccttaccttggggctggggaagaggactgtgtgagaggggcgccttttcagccctttgctctgatttccttccaaggtcactcttggtccctggaagcttaaagtatctacctggaaacagctttaggggtggtgggggtcaggtggactctgggatgtgtagccttctccccaacaattggagggtcttgaggggaagctgccacccctcttctgctccttagacacctgaatggactaagatgaaatgcactgtattgctcctcccacttctcaactccagagcccctttaaccctgattcatactccttttggctggggagtccctatagtttcaccactcctctcccttgagggataaccccaggcactgtttggagccataagatctgtatctagaaagagatcacccactcctatgtactatccccaaactcctttactgcagcctgggctccctcttgtgggataatgggagacagtggtagagaggtttttcttgggaaagagacagagtgctgaggggcactctcccctgaatcctcagagagttgtctgtccaggcccttagggaagttgtctccttccattcagatgttaatggggaccctccaaaggaaggggttttcccatgactcttggagcctctttttccttcttcagcaggaagggtgggaagggataatttatcatactgagacttgttcttggttcctgtttgaaactaaaataaattaagttactggactggtggatgcagatggtgatgtatgtacccacacttgggatcccagtccatagcttcttttctaggtgaattctcctaccttcctacactcagtgactttatgtatatcctgctgagttccgcaaaggatttgaaatgaatctcagtgactttgttggcaacttttcctttgtaaaaccaggaaggactcctaggtgggaagggctagagttccagatgtaggccctattgactctctatgcgcctcaactccagatttcaccttgatcactgccttagaacaagggctggcaatttttttgttttttttcggtaaagggctggatagtaaatacattacacttgtggtctttgtcccaactattcaactctgccacaactactcaactctgctgttatagatcaacagcagccatagaccacacataaacgaatgagcgtggccgtgtccagtaaaacttcattcacagaaatgggctgcaagaccaaatttggtcccctagctgcagtgtgttgaccctcattctagaccacgaggttgcctttgttctggagtttttcagtcctaaatgtatctcaacactgaatttggacccaaaagaacaggtacttttttctctggttccaaaggagtgaacttgggatatagatgcaagactgatgggaaacgtataaaagagattcatatgcttgaaatgggagtttttccctctggaaactagcaaaaccagcatgttctctcatggaattatttgcatgttttttgtccttatttatttgattgagacagggtctcactttgtcacccaggctggagtacaatggtgagatcttggctcattgcaacctcctcctcctgggttcaaaccatccttgtgccttagtctcccgagtagctgggattacaggtatgcattaccatatctggctaagttttgtatttttagtagagatgggttttcgccatgttggttggccaggctggtctcgaactccttgcctcaagtgatccacacgccttggtctcccaaagtgctgggattacaggcgtgagccactgtgcctggcttatttattattattattttttgagacaggatctcgctctgttgccttggctggagtgcagtgacatgatcttggctcactgcaaactccacttcttgggctcaagtctgggtccaagagtagctgggactacagacacatgccaccacacctggctaatttttgtgtgtgtgtgtatttttttgtagagatagggtttcaccatgttgcccaggctggtctagaactcctgaccttaagcgatatgcctgtctaagcctcccatgaccttcctcatttagagctcttttgtatgtcatcttagtaaaataattcctttatcttttaagagataacatcaactcaacagaacaggatttatttttatttatttatttttgagatggagtttcactcttgttgcccaggctggagtgcaatggcgtgatcttggctcactgcaacctccacctctctgattcaagcgattgtcctgcctcagcctcccaagtagctgggactacaggtgcgtgccaccacgcctggctaatttttgtattgttagtagagatggggtttcaccatgttggccaggctggtctcaaactcctgacctcaggtgatccacccgcatcagtctcccaaagttctaggattacaggcatcagccaccaagcctggcctaagctgttatctttctaagattcaatgcagacaaggaatatgcatcacacatttagaacttcacaaatgactgcacacttatgcagctgccagatgctgactctaacaggttatttctttggccagagaatgtagaaatagttctctccacttctctagacaatagacacttctgctaccctcaaaatcagatgaaatgagagtagtaaaaaggtagtgaggacattttgaggagtattaggttagggctgataagagtgagtgggttcctctctccttcccaacagtaaggcagagcagagtggcatctccttgggaacagtcatctagagataaatgccatcctccagccctaagaagggtggagagaagagtacaaggaaaatggtggtgaagaatccatcgtttgtccttctaaacagaagagcctgtgacctaatgtacccaaaaagnnnnnnnnnnnnnnnnnnnntgagactcccgttctcaataaatacatacatacatacatacgtaaactgttttcttcctttcttcctttctttttctttatttcctttctttctttctctttctttctttcttcctttcctttccttcttctttcttttctttctttttttttttttttcatacaatgtcttgctctgtcttccaggctgagtgcaatggctcaatcttggctcaatgcaacttctgcctcccaggttcaagcgattctcctgcctcagcctcccaagtagctgggattacaggtgctggccaccacacccagctaatttttgtattttttatagagatagggtttcgccatgttggccaggctggtcttgaactcctgacctcaggtaatccatccgccttggcctcccaaagtgctgggattacaggcatcagccaccaagcctggcctaagctgttatctttctaagattcaatgcagacaaggaatatgcatcacacatttagaacttcacaaatgactgcacacttatgcagctgccagatgctgactctaacaggttatttctttggccagagaatgtagaaatagttctctccacttctctagacaatagacacttctgctaccctcaaaatcagatgaaatgagagtagtaccaaggtagtgaggacattttgaggagtattaggttagggcagtacttttttttgttttttgagacagggtcttagggtttctgtcacccaggctggagtgcagtagcgtgatctcggcttactgcaacctccacctcctgggctcaaccgatcgtcctgcctcaacctcttgagtagctgggaatacaggtgtgcaccaccaggcccggataatttttgtatttttagtagagatggggtttcgctatgtcgtccaggctggtcttgaactcctggactcaagctatctgccctcctctgcctcctaaagtgctacggttacaggcatgagccactgtgcctggccataggacagttttgtttgtttgttttttgtcttatttttaagagacagagtcttgctatgctgcccaggctggtctcaagctcttggacccaagcaattctcttgccttggtctcccaaagtattgggattacaggtgtgagccactgtgttcagccagtactttttttttttttttttaatttagagtcagtgtcttgctctgtcactcaggctggagtgcagtggcaagatcactgcagccctgaactccttgactcaagtgaacttccagccccagcctctcagagtgttgggatttacaggtttgagtcaccacactgggctctagggcagaactttgtggccaaattttatgtcctggatttccacttgagcattgagaattctgggtttggaaatttgatggagacaggagaaatcccatccttacttcaggcacttactgaacctagtgtatgtggaaggaagaggggatgcacttagaatgggcataggatataagagaataatgataaagaatatttataatcagaacttctcacactcaggacgaggaaggagaatctctaacagagtcacagcatgattatttcagctttttcctgtttccttcctctgtactttgggtccctctttcctttctagcgttccctcttccttcatcagacacactgtgtggcaaacttaagccccaaaccacaaccttgacaaattccaaatggattttgtcagcaaggccaacacaccccttcgccactccctatccctgctcctagcacatgcactggggtcagcgacagggttggagtatgcaacccacagagctggtggctacaatttcagcttttactaggctccaatggcagccagagggagggagaaaggctgatgaactgtaagacgggcctcttgtccctcttcagctccagatgagttctactcctgctggcctttaccaagtggctgggaagttagggaggggcagtggccagctaattgccagctgggcagcactcctcctatctctgctcctgtttgctccatgggcagcgcactctgatgctgcaacagacgttttcttcttcagactccagacaggtgaaggacagaagcgctgggagattctctagtcccattaatcagtcctgactgacataccatggtacctgctgcttactacattagactgtcaccatttccatctttctattgcactggggataaaaccttgagaagatctgaagcactgggcaggaatatcaacaggttccacctccttgtctgagttccacaggcatgtgcacgtggtaagggcactagggaggttttataaatcatagttttggtggacagcatggtgggataacctggtggagtgttactagaaatttctagagaaataaatgaaagagtaatcacatggaaatatcaaaaaacccactctaggagtaataatactggaggaagatccttttgtagttcataagcataatgactgggtgcttacacacatgtgagatgtgccaccctcaaaccttgttacattggcacactatccatttgacatgaacaacaacaacaaaatactggaggtgtcttttgtccttaaaaacacagagctgggctaggcacggtggctcatgcctgtaatcccaacactttgggacgcctagatgggaggactgcttgagctcaagagtttggcctgggcaacatggcaaaaccctgtctctacaaatagcataaaaattagctgggtgactgggcatggtggctcacgcctgtaatcccagcactttgggaggctgaggcaggtggatcacctgaggtcaggagttcaagaccagcctgaccaacacagtgaaaccctgtctctactaaaaatataaaaattagccgggcgtggtggcacatgcctataatcccagctacttgggaggctaagacaggagagtcacccgaacacaggaggcagaggttgcagtgagcggagattgtgccattgcactccagcctgggcaacaagagcgaaactgtctcaaaaaaaaaaaaaaaaattagccaggcatggtggcgtgcacctgtagtcccagctacttgggaggctgaggtggtaaggatcacttgagcccaggaggnnnnnnnnnnnnnnnnnnnnaaaaaaggagggcggtgaggggctggatttgttatgggagtggcagaaataagagcggaaaaaagggaggaattactgcacactgcaccgttgagtgggtggaggcggcgtgtcgtatacagagggaagccggaaggatgcaaagaacaagaacaactaaaaaatgtaacttatgccacagcttgcacctattcgactaaaattatgggaggagaagggactcgacatggagggaaggagataagctgtcttgcggcgtcagaaaggcggggcttcactaatggaatatcggtgactgcaagctccaactcccgggttcacgccattctcctgactcagcctcaggagtagttgggactataggcgcctgccaccacgcctgcctaattttttgtatttttagtagagacggggtttcaccgtgttagccaggatgttctcgatctcctgacctcgtgactcgtgatccgcctgcctcggcctcccaaagtgctaggattacaggcttgagccaccgctcccggccaagatccagtttcaaaaacagaaaaaaaaaaaaaagcaagaaacaaacaaacaaaaccaccaacaaaaacacacccgacagaactacccagcacagtggcacatgtctataatcccagctattcatgaggctgagacaggaggatcacttgaacccaggaattcaagactgaagtgtgctatgatcgctcctgtgaatagccactgcactccagcctgggcaacatagtgagaccccgtatcttaaaaaaacacagagatgtggctcacgcctgtaatcccagcactttgggaggctgaggcaggcagatcacgaggtcaggagattgagatcatcctggctaacacagtgaaaccctgtctctactaaaaaaacaaaaaattggccgggcatggtggcacacacctgtagtcccagctactcgcgaggctgaggcaggagaatcgcttgaacctgggaggcggaggttgcagtgagctgagattgcaccactgcactccagcctgggtgacagagcgagactccatctcaaaaacaaacaaacaaacaaacaaacaaacacacacacaaaaacaaaaacaacccacagagattagcagggcagcagcccttaatagcagtgcccaggacagatataattccttgttataaacaggttccttgtcatccatctcatcccttaccatcttaaattaaggtccccttagcttgacattctagggtcatgttatcaggttaacataagagagagaacagactgggttaagggactgtaagtgcatacaccagggattgatgaggacaaggagatcgacatatatggcacctaccagctttttttttttttttctttgagacaaagtcttactctgtcgcccaggctggagtgcagtggtacgatcttggctcactgcaacttccgcctcccaggttcaagcgattctctggcctcagttcaagtagctgggattacaggtatgtgccaccatgcccggctaatttttgtattttctggtagagacagggtttcaccatattggccaggatggtctcaaactcctgaccttaagtgatctgcccacttcagcctgccaaagtgctgggattacaagtgtgaacacagggcctggccccagcttagttcttcttggaagcaaggaaacaaacaaacaaaatcaaccaaggcaataaattcataagagcaacaatttgggctcaagccttagggaagagccatgtgttcattcccttatactgctgtaaatgaggagagagggcacttagagaaccttctattggccgggcgcggtggctcacgcctgtaatcccagctactcaggaggctgaggcaggagaatcgcttgaacccgggaggcagaggttgcagtgagccaagatggtgccattgcactccagcctgggcgacagagtgagactcttgtctcaaaaaaaaaaaaaaaaaaaaggaaccttctgttcttagcattactagtgcccttctatcacagctatttttgtttcaaggcagttctgcatgtctagaccaggtgcaaaacggagtgtgagggaagtaggagtgggtaggaagcaagaaatatgggtgcaaagtccttcacctttccttgggatactaaaatccctactcatctaggcacacttcctcaaaccacacttctgaatattaggtttccactctccgtctttcaagttccaacttaactggctcagagtccagctgttttcctttagcctcttaagttcatcactctccttcctcttccttatgggaaaggatctcttgattcagaccccacagtaatctagtctcaggaatagtgagcaacaacaatggtgcggtgagggctttcaggggatggcagctagcccagattaagaaataaagatgaagtctggctgggtaaggcatgccacagcaacgactgttcacccatatcccgatgctggctttgcccaaggagcccctgggccccgcagcccagcccgtctcctacgcagccaacttgccgcctcagtccttaaattccaggcacaaccctggagcttgggattgtcacctcagtcctcactgtctcatccccattcacggctcccgcctccgccgcccacagcccccacacctgcccccgccctgactccagctccagcgcccggctgccggtgctgcagccgctgccatggtgatgggtctcgcgagaactgccgctagctaccgcgcagctctcgcgcgatcggggaggtgggaagtatcccgggctgggggtgggggtacgccgcacagctccagtcgccgtcgcggcttccggtgctaggtggagggaaggaaggagggagccggggagtgggccagggcagcagccgggctgaagtcggcttggggagccagagggagcggagcggaacctgcggggcagaggcggcggccgcagcggcgcagctgatagcaggaacaggtgagaggctgggaagggaaggcgggtcccggtagagaagaggctcggtcagggtgagggctgaggagatagagcgcctcccgggccccgcccggcactgcttggcgtggggcggtgggattcttcccacccgagagctcagagagggtgcgtcgggccagcttcacgcctgcccccgcatttgaaggacgcagagctggggtgggggtggggggcgcacacggatttgtcctccgcctcgctcaagggggcgacctgggctgcagttaggttgtcgcctgcaggaggtgtgctgttgagggagaggaaaaccgtccgaggagaggtgatgagggggcggtgatggctgtttgtatcttttctgttaaagggctagggaatgctgctttcttctactccctctccctcccccaccttagcaataggagacgggagagaagccttgctgtggttacaccccctcccccatcatagggcaggggtgcgtaggggggttgggggttagccaacagggcaggctgctggggcaccacatgggcgctattgtggtagaggttgcgctttcgagtctagggaaccgcaggttgggaagagggcagcaagtggggagagggtggagaggaggcaggagaaggaggagggggatctgatcttcctgggagaagagaggtggggccttcctccccaggcggagcgggggcggtctcacaggaggagggagcatcttgtcactggccctcagtttgtgtcttccaatccgctttctttctttaggaagtaccaggattcccggaacagaaaatggagccattgcttacgcgaatcgtttgagggaaggggcgggagttggggaggtggagttccctgttaaaacgggccacttgattagcaaagtggtagctgttattttgggggaattcccgtcttgattgcattaaggcgggtctccatctttccaggccaggaggaatgtggtggtggaggtggaggattgtggtatgtggtcaggagtgagaagaaatagtaaggccgtcccggtgagggagaaatgtaacctaaaacctgtctctgctgttgttggattgggtcacccctggtctatggcatgaaagttttattgggaggagatctgctgcaagagtctgattgcttgggtcagtgcaacaggacagaatctagtcgctgcatacctccttccctgtcctcaatcaggtaggtagtaacagtctttgctgccattttgtcttgggcttgttgttggggtaggtgtttccacttgccgtgacttgggacatgggacagtgttatgggacagtggattatcatagcccattggacttgagtttgaaaaacatgtctgtaaaagttcattctaagaaagaaactaatccattaaggttcagcttttcaccgaatgaatgattgaccttggattcagccaggaaaggctcccatgtatcacatattcacatgcgtcctgtttcccagcatagaattattaccttgcatagttagaatttttatagttgtctatcttgcttttccaaagagactagacgcttttcgactgcaggaactggatttcgtctcctcttccacaatgcccatgcaaacagtaggtacccatgatgaatttagaatgt

SEQ ID NO: 1350 - DNA, 1992 bp, Homo sapiens
gctcggggaggggctgcagctccgtcagcccggcagagccaccctgagctcggtgagagcaaagccagagcccccagtcctttgctcgccggcttgctagctctctcgatcactccctcccttcctccctcccttcctcccggcggccgcggcggcgctggggaagcggtgaagaggagtggcccggccctggaagaatgcggctctgacaaggggacagaacccagcgcagtctccccacggtttaagcagcactagtgaagcccaggcaacccaaccgtgcctgtctcggaccccgcacccaaaccactggaggtcctgatcgatctgcccaccggagcctccgggcttcgacatgctggaggagccccggccgcggcctccgccctcgggcctcgcgggtctcctgttcctggcgttgtgcagtcgggctctaagcaatgagattctgggcctgaagttgcctggcgagccgccgctgacggccaacaccgtgtgcttgacgctgtccggcctgagcaagcggcagctaggcctgtgcctgcgcaaccccgacgtgacggcgtccgcgcttcagggtctgcacatcgcggtccacgagtgtcagcaccagctgcgcgaccagcgctggaactgctccgcgcttgagggcggcggccgcctgccgcaccacagcgccatcctcaagcgcggtttccgagaaagtgctttttccttctccatgctggctgctggggtcatgcacgcagtagccacggcctgcagcctgggcaagctggtggtaactgaaaacctgaagcggaaatgcaagtgtcatggcacatcaggcagctgccagttcaagacatgctggagggcggccccagagttccgggcagtgggggcggcgttgagggagcggctgggccgggccatcttcattgatacccacaaccgcaattctggagccttccagccccgtctgcgtccccgtcgcctctcaggagagctggtctactttgagaagtctcctgacttctgtgagcgagaccccactatgggctccccagggacaaggggccgggcctgcaacaagaccagccgcctgttggatggctgtggcagcctgtgctgtggccgtgggcacaacgtgctccggcagacacgagttgagcgctgccattgccgcttccactggtgctgctatgtgctgtgtgatgagtgcaaggttacagagtgggtgaatgtgtgtaagtgagggtcagccttaccttggggctggggaagaggactgtgtgagaggggcgccttttcagccctttgctctgatttccttccaaggtcactcttggtccctggaagcttaaagtatctacctggaaacagctttaggggtggtgggggtcaggtggactctgggatgtgtagccttctccccaacaattggagggtcttgaggggaagctgccacccctcttctgctccttagacacctgaatggactaagatgaaatgcactgtattgctcctcccacttctcaactccagagcccctttaaccctgattcatactccttttggctggggagtccctatagtttcaccactcctctcccttgagggataaccccaggcactgtttggagccataagatctgtatctagaaagagatcacccactcctatgtactatccccaaactcctttactgcagcctgggctccctcttgtgggataatgggagacagtggtagagaggtttttcttgggaaagagacagagtgctgaggggcactctcccctgaatcctcagagagttgtctgtccaggcccttagggaagttgtctccttccattcagatgttaatggggaccctccaaaggaaggggttttcccatgactcttggagcctctttttccttcttcagcaggaagggtgggaagggataatttatcatactgagacttgttcttggttcctgtttgaaactaaaataaattaagttactgga

SEQ ID NO: 1351 - protein, 293 aa, Homo sapiens
MLEEPRPRPPPSGLAGLLFLALCSRALSNEILGLKLPGEPPLTANTVCLTLSGLSKRQLGLCLRNPDVTASALQGLHIAVHECQHQLRDQRWNCSALEGGGRLPHHSAILKRGFRESAFSFSMLAAGVMHAVATACSLGKLVVTENLKRKCKCHGTSGSCQFKTCWRAAPEFRAVGAALRERLGRAIFIDTHNRNSGAFQPRLRPRRLSGELVYFEKSPDFCERDPTMGSPGTRGRACNKTSRLLDGCGSLCCGRGHNVLRQTRVERCHCRFHWCCYVLCDECKVTEWVNVCK

SEQ ID NO: 1352 - DNA, 2280 bp, Homo sapiens
gctcggggaggggctgcagctccgtcagcccggcagagccaccctgagctcggtgagagcaaagccagagcccccagtcctttgctcgccggcttgctagctctctcgatcactccctcccttcctccctcccttcctcccggcggccgcggcggcgctggggaagcggtgaagaggagtggcccggccctggaagaatgcggctctgacaaggggacagaacccagcgcagtctccccacggtttaagcagcactagtgaagcccaggcaacccaaccgtgcctgtctcggaccccgcacccaaaccactggaggtcctgatcgatctgcccaccggagcctccgggcttcgacatgctggaggagccccggccgcggcctccgccctcgggcctcgcgggtctcctgttcctggcgttgtgcagtcgggctctaagcaatgagattctgggcctgaagttgcctggcgagccgccgctgacggccaacaccgtgtgcttgacgctgtccggcctgagcaagcggcagctaggcctgtgcctgcgcaaccccgacgtgacggcgtccgcgcttcagggtctgcacatcgcggtccacgagtgtcagcaccagctgcgcgaccagcgctggaactgctccgcgcttgagggcggcggccgcctgccgcaccacagcgccatcctcaagcgcggtttccgagaaagtgctttttccttctccatgctggctgctggggtcatgcacgcagtagccacggcctgcagcctgggcaagctggtgagctgtggctgtggctggaagggcagtggtgagcaggatcggctgagggccaaactgctgcagctgcaggcactgtcccgaggcaagagtttcccccactctctgcccagccctggccctggctcaagccccagccctggcccccaggacacatgggaatggggtggctgtaaccatgacatggactttggagagaagttctctcgggatttcttggattccagggaagctccccgggacatccaggcacgaatgcgaatccacaacaacagggtggggcgccaggtggtaactgaaaacctgaagcggaaatgcaagtgtcatggcacatcaggcagctgccagttcaagacatgctggagggcggccccagagttccgggcagtgggggcggcgttgagggagcggctgggccgggccatcttcattgatacccacaaccgcaattctggagccttccagccccgtctgcgtccccgtcgcctctcaggagagctggtctactttgagaagtctcctgacttctgtgagcgagaccccactatgggctccccagggacaaggggccgggcctgcaacaagaccagccgcctgttggatggctgtggcagcctgtgctgtggccgtgggcacaacgtgctccggcagacacgagttgagcgctgccattgccgcttccactggtgctgctatgtgctgtgtgatgagtgcaaggttacagagtgggtgaatgtgtgtaagtgagggtcagccttaccttggggctggggaagaggactgtgtgagaggggcgccttttcagccctttgctctgatttccttccaaggtcactcttggtccctggaagcttaaagtatctacctggaaacagctttaggggtggtgggggtcaggtggactctgggatgtgtagccttctccccaacaattggagggtcttgaggggaagctgccacccctcttctgctccttagacacctgaatggactaagatgaaatgcactgtattgctcctcccacttctcaactccagagcccctttaaccctgattcatactccttttggctggggagtccctatagtttcaccactcctctcccttgagggataaccccaggcactgtttggagccataagatctgtatctagaaagagatcacccactcctatgtactatccccaaactcctttactgcagcctgggctccctcttgtgggataatgggagacagtggtagagaggtttttcttgggaaagagacagagtgctgaggggcactctcccctgaatcctcagagagttgtctgtccaggcccttagggaagttgtctccttccattcagatgttaatggggaccctccaaaggaaggggttttcccatgactcttggagcctctttttccttcttcagcaggaagggtgggaagggataatttatcatactgagacttgttcttggttcctgtttgaaactaaaataaattaagttactgga

SEQ ID NO: 1353 - protein, 389 aa, Homo sapiens
MLEEPRPRPPPSGLAGLLFLALCSRALSNEILGLKLPGEPPLTANTVCLTLSGLSKRQLGLCLRNPDVTASALQGLHIAVHECQHQLRDQRWNCSALEGGGRLPHHSAILKRGFRESAFSFSMLAAGVMHAVATACSLGKLVSCGCGWKGSGEQDRLRAKLLQLQALSRGKSFPHSLPSPGPGSSPSPGPQDTWEWGGCNHDMDFGEKFSRDFLDSREAPRDIQARMRIHNNRVGRQVVTENLKRKCKCHGTSGSCQFKTCWRAAPEFRAVGAALRERLGRAIFIDTHNRNSGAFQPRLRPRRLSGELVYFEKSPDFCERDPTMGSPGTRGRACNKTSRLLDGCGSLCCGRGHNVLRQTRVERCHCRFHWCCYVLCDECKVTEWVNVCK

SEQ ID NO: 1354 - DNA, 91609 bp, Mus musculus
  misc_feature (1)...(91609): n = A,T,C or G
gaggaacagctggctttgctgagccttggtacttcacgctcatctatccactccctctgtgatgactggtgcagcaatggatgctggcatctggcaccgctgtgtgctcgagggtttcagcctgtttgactctctaacccacttgcagccttgaagacagctcagagaatgagtgacagagggattgagtctaatgttgattgaaagacaaacaaacacacaaacaaaaatttaaagaagaaagaccctacttctgtgctgtatcccagctctcctgccaacttgttgtgtggtctgacgtgtgacatggcgtgatgaagacttgttgtgtggccagatgtatgacatggcgtgatgaagacttgtgtggccagatgtatgacatggcatgatgaagacttgtggggcctgatgcgtgacatagagtggtgaagagttgttgtggggcctgatgtatgacttggagtgatggagacctgttgtgggtcctgatgtgtgacacgggtgaaggagatggtccctttctctcagggctgtggtgaatgagcgaatggcagtagcacatcttatgttggatcagtgcagatgctgatgccacctttactcccttagccttctgcctctcacctttcccggcccccatgaggattcttacatctcctctcctacccttgcccaccccagtgtttatgccactactgcatttcttgaagcctctttctgcttaggagtgacctttctcatgccatccacccatatgagttacaaagaattgctaaaaatgtgagtcaaaaagagggacagacatagaaccatgccataaagcattgaggggaacctgtccttctgaggcagacccagctctctcagtctatgcatcgctagcttctagaaagtactatttacaaactgaaacagacttaaagttaaatcaagatgagtacttatgtaagtggaagcaatgcaatttgattataattccaaagataaatatgataattcataaacggaagagtggtggttttggttctatctgtcataccaaagaattgccattttctcctaatttggagctctctctgtctttctctctctctctctctctctctctctctctctctctctctctctctctctctctctctctctctctctctctctctctgtgtcttctctctgtctgtcttctctctgtctatcttctctctgtcttctctttttttgtctgttctctctctctctctctctctctctctctctctctctctctctctctctctctctctctctctctcttgtggtgttctctagtaataattttagagctttggtttcttgtgaaaaaagaaagaaaaactaaagaactataagaatatgtttttgatttagtcccagctgtgggttatgggactgcttcagatggtccaccacagctgattatgattttcctcgagttctagcaggggtgtgattttgccagctgcagatagtttttgtgattgtgtgacatttgagattctgggaactttttatatggtctataaatgctcatgcccaggaaggcatggggagttatttttcggttgttggttgttgttgttcttgggtttttttgtttgtttgttttgttttgttttttttggttatgtacaaagaagatataacaacaagaagaaattaaatatcctgacagctaagatcaaacttgtcccaaggaaatccatgcccctaatcagcaggaagtagtctaatgataatgtcatatcctttcccctctatcccttttccctctgctgtctactgtgagggggttgaaagggtggaaagggggtagacaaggctgtaagaaagaagaacccatgtagtgccacagcagccaaagtccagctacagtgtctcgcctcttgttttctttctttctattctttctttcttttgtgtgcatgtctgtcatttttgataagatctcccactaaacctgaagctcactgcttaggttatgtcagattgcttgtaggatccacctatctcttgcctcttcaccccctggtgctggagttacagacaattactgccatacctaactttcacatgggttctgaactcatttctcttctcttctcttctcttctcttatcttatcttctcttctcttctcttctctaccnnnnnnnnnnnnnnnnnnnnnnnnnnnnnnnnnnnnnnnnnnnnnnnnnnnnnnnnnnnnnnnnnnnnnnnnnnnnnnnnnnnnnnnnnnnnnnnnnnnnnnnnnnnnnnnnnnnnnnnnnnnnnnnnnnnnnnnnnnnnnnnnnnnnnnnnnnnnnnnnnnnnnnnnnnnnnnnnnnnnnnnnnnnnnnnnnnnnnnnnnnnnnnnnnnnnnnnnnnnnnnnnnnnnnnnnnnnnnnnnnnnnnnnnnnnnnnnnnnnnnnnnnnnnnnnnnnnnnnnnnnnnnnnnnaaacccccctatcccatcccccttcccttgctcaccaacccacccactcctgcttccctgtcttggcattcccctacactggggcactgagcctttacaggatgaagagcctcccctcccattgatgtccaacaaggtcatcctctgctacatatgtggctggagccatgagtccctccatgtatactctttggttggtggtttagtccctgggagccctgggggtactgactggttcatattgttgttcctcctatggagctgcaaacctgttcagcactttgggtcctttctctaacttatccattggggatcccgtgctcagtccaatggttggctgcgggcatccacctctgtatttgtcaggcactgggagagctctcaggaggatgctatatcaggctcctgtcagcaagcactttttggcatccacaatgtgtaacaagtacttttcccaaacagagccatcttcccatccccctgatccagctttctctgatggtatcttcaatagataaagaaatgccttgagctggccctgtggctacccactgagcaagactaagaagcaaacattatactaacatttcggatcaagcacttccagcccagagcagaccttctggttgggttggtgtgccccatctatagcctgcttgccacatgcaccccagctctgaatgcaacacaatataaaatggtaattggacttaaaatatgaggctttttaaagccatttctttctttttgtcagtcaattgcatggctcccaagtgtgaactttatatatagtggcatcatggaataatgtcaaaagattgctccccaacctcagaaggtcactagaaagaacatgagcagtagatatagtgttctgtgctatgatttttaaaatgtatttgctgcagctggtaagccacagtggcacttaattaaagtgggaaaggtatagctggaacatttaaaataaaagcgtgcagcactgcactgtttacatgcagtccagcatgagaggcacagctcagctctgatcctcctccaagtgttcaggagccactgccctctctcacttaggcccttaatttacagagcaagccctacaagccgggaccaaaggcagagcacactcagcccaactgtgcctgaacctgcccagatagagggcttgcctgcagccatgcgccatcttttgtgttgtagtgtgacacagtgaagcaagcccaaagagttaggaaagacaaaggactggcataaaaatgctcaacttaaaacgtaggtgacaacctttgctgctccttaagggcattgcacagtggactgggagaagtcagacgatttgggtagattgctcaagtggggttttcatcggtcagctggtgaatgggtatcaggatacctggcatggaactaatgagatggttcagcggatgaagcactgctacacaagcataagtatccgagtctggagtttcagcactcacaaaaaaagccctagtaaggcactgcacccttggaatcccggtgctagtcaggtggaggcagaaggatccctgaggctcaccagtcagctagtctagcaaatcagcaagcttcatgttcagggagagcccctggctcaaaaaaaaatgaggtggagagtaatagaagacacattgatttctggctccccgtaggcatgagtgcgtgtgtgcacatgcatgattggaaacacatatacaaacaaaaacatgtacttgatgatagtaaatagtaatggcaggcatgactgactgaacattattgaacaaggattttctgaaggccttcacattgtaaccagggaccaccgttcttcctactttgcagctgagggaagcactcagagaggtttagtagctttgccagtgtcacacaggtgggaggtaggagaacagggcaatgttctgcagaggaaggctgtacagctggtgctgtcgctaactcagccatacttgcataaggacccagggaagtgatattaccatcatgagtgggaaatggccctggtgagtggcagatgatgccagaagatcacaagaaggctggggtgtcctagtgaggaactttaaagacttacaacatgctgagaacccttgctttctgttcctcttgatctttctgatcatggcaaagattaaatcctgctaacaggctgtcttgtccttgtactgtcccagtctgtttcagcctccccttttaaacagagagagcaggtgtcagagactccaggaagtaataacatctagccagtctttataaaaccatttcctgctatctttattgtcatgctgaggagatgctggcttttcatgatataggccatgcaaatatttctcttcaaatgcagtttgtgctaacccctttagaggaaacaagaacaaggtgtcactgagacatttcaaagctaacaaaagttggggaaaggaaggttgattgctgagtgaatggtggccttttgcaggttttcggttcatatacaacccatggttcacactcaacacatgccaaggtcactggggagagaagaatgccattctcgcttctagtttgttaagaagtgaagcaagccttttgtgggctggataacactaatctttgcaccgaaactatgggtgttaaccaagcttgttctgagagctgatggctaaaatgggaggatgagaaagacattcatttctgtcttcattgaaccataaaaagtgagtcatgcaggataggctctggggtcagagcgtgcatcagaactgtgaggaagcagggccttccccataatggctatgctcagggcagcttctgggtggcttcttttgctacttcccaccctacccccagcatggtgagtctcttcccatagcagcaactggactccgtggcaatccctgaagtatgaactgagtcatggtagaactcagtaactcaaagtttgcagacatttccccaatgtaccaccattagacggaacaccatgaattgcagagagactccacaaagggaaaggcagagatgattgtctccaagctccagtatgtaacatgattgtgtggtgcaattttccctggaaagagtatcactaggaaggtaagcagcccaggtctactgtaacagtcagctagaaacgttctggaagaggaagaagtcccgaatcagttcagtcagctttcaccaggccgtgcttcaggagcaaacagtccttaatttcagaggctcccaacaactaaagcgtggacttcagggtttgactgagttttctcagtatgagctccataccaagaagcaaaggtgcatcttatagcaaagggacaaagagcgatgacaggaccatgggaaagctcttcatgcttctgcttggaaggtgacaggtgtgacttctactctgtacttattcaagttctcaggggaaggttctaagacaagagtctgagttcatttatatcatttgcaggaaatgctagtatcgaagtggaaagtgagccaaggaaggatcagtagctggggcagatgggtcatggagctccagaccaccccaggctaatgtgttgacccttttaagcttgttgatcatcgctgcttcgtagaggtcagctccccagagctccaggctgtgtgaacacaggcagactgaccttctcatttctgatgggctgtaggtaaagtcagagacactagcaggtggctgcttgcctgatgtcactggagtgatatggcatgagatatgagggcatgagattgtggacatttcattggcaacacatgttttggggatgtgtgctgtctttccatgaagaaatagaaaacattgaaaatgaaggcacagtttctgcaggaagtatgaactctgaggtattaaatgctgggaaatctttagtggtagaaagtggacatgtagacacaggggtggggttcatctatgctttgcaggatccctccctcacctgcacaaagctacttctgaatccttccttctacaatgactaaaatgatcagatattgccaactgcccctaggtggaaaatttaccctctaacaaaccagtgctgcacactgctatttctcaaggagttgcctgctgaaagatgtcatggcttaataggagaaacaagacaattgatataggagctacagtggtagccacccagaggtgctcgagtctgttcagataacttcacagtgaaacagaaattctttgagaatgggaatatcagctatcttaagggcgggatgtccaggggagactctagagataataacatctgtagatcttgaaggcgatggggcattttccagatgagcatgggcctttgtgtagcttgtgatgagaagggataagaaaatgacaggtgggggcatttgttcaacagtatgcaggttttctccctactttagctccaaccctggcttgaaaccctaccaaaaaagcatgttggcagcaagtcactttctttctgtgcattgtaagaagttcctataaagcaccttctttcagggtcagtcttgtccatcattcccagatgaccagattagttagcagcattcctgagcaacctgtatcctagaattccatcacttgggggaatccctcatctgtctcccaatctcaagagtatctctgacaaactatgcatattagaaagtatagcccccttgattgtgagtgggtcactctcatcaacgtgttccaggtgtttcctgtccacagtcccttcctttctcataatcaggcttctggctgctggctgcctgctgctggctgccacctactcaagcctgcatgatggggagcagggcgagtctgtcttacagggtggaatctgaattttctgcctgggcgatgcctgactaatccattaaccagctgtctcctctgcacattcccagaagatggctttctttccattcctagtctaccctactcccacctccaccatgttccatcctttctccttactcatgccccacctgtacccttctgtagggaggcagcactccttcccaataagagatcatgtaggacagctcaccattggcctactgttcaaactgaggaatgttacccagcctctctggacattttccttctctttttttatgaatgggactatagcagtacccacttacaggggtgggaagatttaaagaagtcagatacctgggaagtatttccgatgtggctagcacatggaaagccttccatgacagccagctagcgtcagtggtccaaagtgataaatgtcagctaaagagaacctagagtctgtgactagatgtggatgtagtcaagctactaggaagctgggtgcaggaaatccagtccatcatgcctctgctgtgattccaatatcaatctgcagcagcaaaatggcctctgagggaattaagggctcagaaaggaatggcaatattcttgcccaagaagtatttatgaaacgatcagataaatgccaatgatggtgataatagtcacactgtagcccatgttctcttccaggcttttctgcacctgacaactgattacatttttaccacagtcccatgcattgttattactgtcagaaattctccttgtgtgaatgatgtgtttgggattcagtgtggttaaaacaatttgcctaaggtcatgcaggtcgtaattgtcagaaggagaactgaatgtgtcttgggctgtgctccggcagatgtcatcatgtgcactaattcagattatccagctatgtccatttatagctgtgattaggaccaagctaggtacatgtctttctcagatgcaataatgcctgtgaaattttggattgggacggaagtggcccacagtgaggctagacatactctatgaaacagccacacattaagaggactagttgggagatctaaaacttaaggaactctgcacagtcacatcaattcatctgtgaaatgttcatggtttccatattctggggcagatagccccagtttgggtatccctagatgaaaatagaggctctgctcttcacaccacacagatgattcacacagatggtcaccaggcagatgattctatgtggcaggtggacagactcccaccaccttctgacaaaagcctttccatagcttctacagcataagacaacatccaactgtgtagctcactgcagttgctcctctttgaacctgaaaccaacacccagtttggagtgcctgccacagctgtgtgagcattgctcaggagccacccacgtgcatgatagtgagtatgctccctggactccttaaacataggatgcatgcagtgttcacaaaaggaaagtagacaggttctttgtgaccttgggagttgcttgactaaatgaagtgatgttgaatctctctctctctctctctctctctctctctctctctctctctctctctcttttcccttattccctctctcttaccccctttctccatctctacattccttccttccatctctctaaatctattgttatgtatgaatattggcactattatgccacaatgcccatatggaggcccttcctccttgtttgaggcacagtctcttgtttgctgcttcgtacactggtcctagagcttctggggcctttactgtctctacctcccaaatcagcataggaaccctaagacaagcaccactgcacctaggtttgcatgggtgcaggagagctaaccccagacccatgcactcctgtgacaagcactatacccacagagccatcaccatccaggtccttgatgagattcttcacagtggatcttttcagaacgtttggtccccagattcacattgtcaccaagagcatctctgctcattcacgttatcaccaagagcatgcatctctttccagtccttggcccctttacctttagaatgaggagtgcttgaaggtgttagtaatattcagagagacacagcctggggaaagatgttcctatcagaggaggccatgaaggtgcttaggtgccaaagctgagttccttgggtagactccattgagttaaataaaccacagaccattgagactgtgcatgtagagggagtctcagatgctgaactaatcctgggtattgataccgagataagtccgaggcaaacttcaaatgagcatggctttaaggagttaagtggttggttcatgatgatgcttggaagaagaatgtttagaaaatgaaaccagggaggagcacgtgatgaatggctaggggccaggcaactttgctaggctcaggagctggctgctgacctgtgggctagctcttggaaattcactgggtctatgaagaagatagatctggctcttgttcacagagagaagagggacatcaaaggccccaaatggtcccgatgaggcttctttcaattcctgtaagttatgcaatgtacaaacaaacacctagcaaccttgggggttggagccaaatgacagccctcaataggacagcatgtgacttctttgacatcaaaacactggataggtaagctttaaaatacccaacttcatgctggggatggacagttgagctcattccagaacttggaagccagtgcacttctacagctgagagaatggtcaggtcagacatttgggttggggcatgatatgggtgggctgtgaatggtaatgtgtagggacaaagaattttatacccggaaaagtgaagacatgtcaagaaggagggatgaatgggaaggaacacggaagggaagcaaggtggatgggagggagggtaggttattaaagatgtgtgagaaccaatgttggcagttggcaacatctgcctactatggctaagctgaccttgcttaaaaatggagagactctgtgagcaaaagggtgaaaagcggctgtatagtaagtgcttaggaaatgtctctggatagtgtgttatatgtggaggtctctgaacctttgtgtacaatgagaatccaggcatctcacggcacacttctcaatgtccatgtgccttttgggtttgaatctcttttactgatgctcatctttctacctgaagttttttttttctccttgaatgactcctaagtcacatgtctgtgagatgctcagtggtgtgttgggaaagctggatcgtcaaccaaaccatcatccatgactttctcatataacgcgtcagcatacagaggggaggtgatgtgtgctgagttgacccacgggttctattttgtagaggttcaaaggcgagcatcatcagcaatcactgctgaagaactgctgaagaacaggttcagatgaaactccacacatcacagcgctgctgtcttatctgtctgtcatgtgacagctctcactgtacttgcagagacagggcagaacaagagatgctactgaaattttattttcagttatccttgctgaaagcactgcaggccaaagattgatgcccaagttaagagactctctggtcttggtgtgctgggaaagagcagctggcttagtgttgatggtgaaaaggtagttttctagcattgcaaaatccacgaactatctgctcttatgttatctttggaaccttgtagaatatgcttcttcccttcttacaacaaacacagtgtgggagttacaccagcccacctcactccctcagctaacttcctcttcaagttactcttccctttccagatgtggaaagaaaatggtggggcaaccccagttcttccacacacctttgctaggctcttggcatagttttagggggacactgtaattagacaaccttctaatacttcattcttttacatgctggttcctagcttcagaagtccaagaaagtgatttaaaaaaaatcaaacaaacaaaaaacagaagctactggtagcagtggttcaggaaaccaaaaagaaccacatagattttgagcgaggactgtcttgttgcacggaggtaatacacatcaaaacctccaagtatgtccccttccactcattacgtaggaggaaacatctggaactgtcttttgcagttttgctcttaagcctgtctttaaggttgtctctctcactttttgttttaaggaaaatggacttagaccattttactgtagaatcttatttaactcacttctagccttggacattgtagataatgaccactcttaggtcgagaggacaaggcactagatgtacttcatactcgaatttttaaacacactggagtcgacgcatgggaacgtagatatggaattctgttttttctggttcttacttcactcttgctgggccacttgcttagccttttcttgatttaactgggctgtttctagtcctcttgattcataactagcatggaaaagacttgtctttgttggtatgacattttatcttcttagagataactccatgaaccatatttgaaaaacatggttactaggcccatgaatgcaatttaaaatactccctaccaatttccagcaagagcaagcctggattgaatggctacctatggtgtcacgtgtgcttctctgcatgaagctacactctcgaatggtttaagtcactctcctctgatttactgtcatactaggaacctgaaagtaaagttaattaggtatgcttaagtaaacagtttaagtttgctaagaaaataagttaagtaatgcttactagtttttagtaaaaaaatactattttatatatacatatatgtatacatataaacacacacatataaacaaacatatatgtgtaaacaaagctccataatgggcagtgtttccactttctacataagacagcaactgcccattgtgacctaatttgtccaaggtgcaagttcatagccagcctcactctgaaattgagtctcaacccttgctgttttcagtacaagaaaagactggcagagagacatggatgcatctctcccaggagctgattgcctggattggtgttagttatggaagaaaatagacaaaggagtgttgggatggctagagtggagatgtcggaagagggagaccagggcttcacagtgctgcaactctgacagtaaacctgtcttggctggtgtcatctgcagaattctggccataggtcttttatcctgaaggcaaattctaccctttagacctttctacaaccgaatggaagaaagtgagctcacactggccaaggcaccaatagaaggaaaatgttctttgaagaagccttatttttgtttgattcttggaaattttatgtcacactccatcactgatttatatttatttctacatgagtgtctgacactaccaatttcttggcttctaatgtgtaatcatttataaatttcataatagaaattctttttaggaaaatcaaattcattataagacattttcagttttcagaaatgtttaaatgggagaaagtatgtatcttagaataaaaccaaaaccaaaaacattccttggagatgtgtggtgtttctagtgggcccagagctgtcttctggcacacagctgtgagcatgctgtggatggcaagtcctcagtagacggtgcacatctgtaaatgttattggggcgtcagtggtgagataggtagagtggggagtgtgaggggttctgaggctctccttatgttttttagctctcctcgtttccacccagtaggatatttctacttgtcattaattgcctttgggcccagatagtctctgttgtaggacagctatggttagcaacactcctggctggtaaccactatagcatctcttcctttagatgggacaacccatgcctccacaaaactgccagtgtcagggcagaagatagacttctggaaaggtatctgataaaaccctcttgaacttaggctctgctcttcattctaggaggtttcttttctaggatgtcacccacaagacacagttatgtcacctactaatgggtttgtatcttggtccccctctatttgatgtttgccgaggcttactgagagaaatatctggtcatttaaggtaggaatcaaacacttgtttcctaacttagtgtgacaatggggggagatctgagtttatcctcataggaagtaccgtctagcagggacggtgggagtctgacacacagaggattagacccaggcggttgagttgggaaggcttctaagagaaggtagtgctgcaccttggtgagaaggatgagcaggagccgccaggagaagggagggtgtggagccttgctcgccagcatttgtatggatgtctctagtagtcatagccaaatcatcaggatgacaggacaggagagggtcaaggaggacagcctcacccgcccatctcagaggttcttcaacagctgcacttactgtgtgctttatttctgtgcatgtaagctgcacttgaaactgaatatgtctttgtgtaatagagtcaccattgtagatgattatagtgtatgaaactatatgcaccaacgtttcagaagtgttaagtgttaaacaagccagagacagaattctgagttactgtatacagtggtccctggttgtaaaccttttcacctgcctgggttttctagccctttaagcttctttccataaggcatattcaactttctcttttttgtctattgaatgcacacttaacatactcccgaaggcactttatcttgtaaattcactaaatattatttgcataccacacaacatttagcttaacattttcttgggactattgctaagtaagttgctgggagaacacaagtttatattgttatcaaaatcctatggcctgggatgtcctccgaatagacctactccacagtctcagcagaaactgaagtcccaccagggacagtaagagcactctggccactccaggaagtggagaagggatcaaaatgtcccatgacctctctggagatggcatcgtgtagacagtggagcaccagcttccaactagggtctctagaacagattctgtttctgcccctccctaggtacctgatcattaatatcccacttaattttctgagccccccatggtctcctctgtgaagtagtactatgataggaactgttttaatgagctatttggaccgtgatgccagactcacgtaagtattaactgtcattaatatgctgttgctattcatctctcagatgaacctgggtcagtgaattgttgttggttggattagaccactggagaggtcagatacacacaaaaaggatataagatgttatctggacgagaaaaagggactcacaaaccctaagaagaagagctattgacggttgatgacttctgggggcggggggagtcagttttactgaaagtccggtctctcacactccagtggatagccccacaccaatgaatatataggcagtattagttggacttggtggtttatttttaaaagaacatgaaatttggtgtgggggaacgaagtggatagatctgggaagagttaggggaagagttaaagggtgattacaattaaaatacattgcatacatgtgtggaaatgtaaaagaattaattaaatgtcattagaattattctttgaattctaaagaaaaaaaaaacctataacaaaaccctgttctcagagggatggcatgtttaagattagtgtggctgaaataacagaatcttcaattccttgtacaacattttctggctgagaattgagggggcttcagtggctcacgagaagtttcaagcatcttctaatcaggtttgatcagtcatccaggtctattggagtcaatcatcaaaggacttgttgcctaagccaagctctttgagttgtgaaatcttatcagtgtgcatctctgccaagatccccaggtgcttcaggcccaggtcgagctcaaatcaaaagccaggacctagcgcaggacagccttgggattccaacctagctctgtgatttattagtcatatgacgtcgaacaagtttcacaaccccagcctctctgtcttctcaattaacctggagtaaattgtttgtgtctttggggtaactgagaatttatagaaacagaggttgcaaagcacacggcatctcactgcacttggggcagacagtcaataaaggtgacaacgcctgtgcctgcctcccacacctacatgataaagcaaggcaggaccagagagtctctgaggctcttcatttgtcaaaagcaaactaaagaaagaatcaaatgcagaggctggctcagcctctagggactgggctatgttctctgcagatttgaccatcagtctccctcgatgaaaaacaggacatcagaatttcctggttcacgtcagacagtggttatgagacatgcagctttgtactcagcccttggcataggcgaccccatccagtgttctcactttagggtcagagatgctgacagcttatttacagttctagtcagtggtagagctaggatgtgtatgataaggacatttctggtgtccatgtttgtaaccaccccaaacaacctagacttctgacactggctggaaagaaatgtagaaaatggatgggaatgactttttcatgcgcacagttctaaagctttctgagaccccaaactatcttctcatctctatgtcctctccaagcccatagcacttagactacagagacatctggtgaaagcagaaacatctaaccagatgtctgatgaggattctgagtaggcacacatgtatatgtctgtgtgtgcaagtacatgcgtgagcacgtgtatgaacatgcatgtggagaccagaggacagctgctgttattgttcctcaagtaatggtcctcagaactcaccaggatgaccagtaaatgtctgccttcctccacaaagcaaccttggccaagatgggcacacttgtggatgtgtattgagattgtgtctttggcaagcttggctaatcaatcatagaacacattctcagtgactctgaaatccacctcagaacactttgttccaggcatccatccactgtaagtgagctggatgctggccctggggtaaaatctcagtcacatccagttttgtctctaaagtgatataaacaccactgagataggttgtggagactgctcaagagattgtgtgcactgagttcctccgtctggccagggttaatgaggaaaatccctcagtagtgtccagaagctagagacagctgatctgtgagacacttgcctgccttaggtcttatggctcctttatgcttggctgctgtgggttttcctctcaggcatagctgtctctaagactcaagtttcgcctgtcttaagatctttttttttttcttcatgccttctctctgttggagagctggatagctcaaactccccagtccagactctggcacgggatctcttccactgtctaaccccactttaccctcacaactctctcctcagcctgtttaaagtgcatgaccttattctacttggggacaagttgcatggtgtcagttaagggccctggagaaatcttgtcaccaccttttctccattttgtctggtctcatctggcccatgagtctcattttcactcaccgagaaagtcacttctatctcctttatgctttttgaagggaacacgtgccactagccatagttcttatgagtaactgagtcactcgagtcacttgatggttaggaagtgcatcttataagccccttgtgacaatgaggcaatcgggccctaatggagcctagagtctgaccacatctgttattctcttggtcaagtgcctgcctctgccaccacatcagacctgctgtggtcaggggatccacactatcagacctcctcaactcggtgcatttgcccaatgttggctgaaatgtggcttctccttctgtctgggcagctatccattctataatatgccattcttagaaaggttcacttgaggatggagggttgtcagtaggaacaatgcaaggagcttatgttaggtgtgctttgcaatgctgcattcttggtatcaggcgcttgctggcatgggtgcctcagggggagagcagggagctaagatgtgagaagaacattacatggacttaagtgtcagcccctctgctgggagccttctattatctatgtctcagtggtctctgttgaaaaacaggtcttaaaacaaccccagcctgataaaatggttgtgagatttaaaggaataaaggatttttgactacagaatattgtacctcattggtacaaacattgatgattatttaaattttcctggcaacaggaatgaatattggattttacttttactttcacaactttctgtagaaaaaaatgcacattattcatataatttgaaaacaatacaatgaaacattattttttgcaataggaacagagtttcgttggtaaagggtgtattgttgttaatcctactagcttctatctttgcccattgtgggtacttcaggatttacttagtttaaggaggaagtctttactctcggtcctctgcatccctccctctgtctgtcttgcttgccaaccagtggaggctccaaccctcctgggtaatgttgggattggcttaggggagtagggagggaaatatggctgtgtgtgcaagaacagaagcaaggaaggaactgtttatggggtgttttacagtgagactgtaattggagctctggaacttagcaagagttataaggtgggataggcttaacaccaagcatcctgaggtagtgtagatggccctggcatggagaataactgtgtgtcacggtgtgtgtgtgtgcatgtgtgtgtgtgtgtgtgtgtgtgtgtgtgtgtgtgtgtgtgtgtgtagaagtggagggccaggtcctgaagacatggtgggtttagtaacttgtctgagactctgtatgtgcacagagcaggacatataggagtcccagttgtgaactccagtcacactctagggacattgtcattctgttcagaagtgtgccatgactgaacatggatgcacaggccaagcctggggctagtgtcttctgatactggaatgccagcatcaacaggtgtctcacctctgctattgaataaggggcagtgggattaaggtgagggaaggattccacagtttctaaaatttaaagggattaattttttcctgagcatacttttttataagatattttctttatttacatatcaaatgttatcccctttcctggtttcccctccgaaaaccccctattgaatcaccctttccctactcaccaaaccacccactcccacttcctggccctagcattcccctacactgtgacatagagccttcacgggaccaagggtctctcccccattgatgatcaacaaggctacatatgcagctagagccatgggtccctccatgtatactctttggttggtggtttagtccctgggagctctgagggtactaattggttcatattgttgtacctcctatggggctgcaaacccccttcaactccttgggtcctttctctagatcccccattggggatttggtgctcagtccaatgggttgctgtgagcatccacctctgtagttgtcaggcactggtagagcctctcaggagacagctatatcaggcttctgtcagcaagcacttgttggcatccacaatagtgcctgggtttggtgactgtatatgggatggatccccaggtggggcagtctctggatggcctttccttcaatctctgctccacactttatctctgtaactccttcttctatgggtattttattcccccttctaagaaggattgaagtatccacactttggtcttccttcttcttgagtttcatgtggtttgtgaattgtatcttgggtattctgagcttctgggctaatatccacttatctgtgagtgcatatcatgtgtgttcttttatgattgggttacctcactcaggatggtattttctaaagggattcaataaaagggattagcatgctatgtttcctgctggaagtggagaatccagagattgcatactctgctgagaggtaccttctgccagagaacatcctccatctctccaaggcagattgtgtgctttgattctcaaacacataaactctgcagtgctggggcagaaggttatcttttgtcaatatatgtaccacgtgagctggggaagggaggaggccacccatcagccaggctttgccagcctctgcctttgtacaggcagcttcttagattcattgttttaaaagtttaagagctctcttccattagaggtgaccaattctcaatctcttgacagaagtcttaactctgcagcacaatacagaagcataaaaacaaaaccctcagatgagtgtttgtgctgaacacctgccatgccagccctaaggaggcagagggggtggctgcaagctggaagccagacaggtctacatagtgagttctaggccatgcagtggtacagagcaaggccctgtcgcaaaagtaagcaaagaaaaacacaatacacctgtccctaaaactccagaaaatgtgtaataattctcttcacctattctcccaagactttcttccactctctccactctcagaggcaacccatgcaaataggttttttgtttgtttgtttgttttttgtttgtttgtttttactttgcaaaagttcttccatatatacagttgttcacatgcaggtacagttttcagtctccatgcagagtgcatctccatacttttgtatatcagcccactggttatcttttaaagaggtttttagtctttactgcatcagcaatgtagagaatgtattcaacatacgtactgtccaactctagcttattacacagttttggccacagaagcatttttcaaagagtagacatctttatgaatgaatacatttctctaaaacagtaaggagatattgtggtgtgccaaatgcatactttatgttgacggaaagcctgaaaacgctccacccacggtacctgcttggcctttcacattaagcatcttggtgtttgctcataatagaagttctcatctgtgtgcatgcactcatgtatttgtgcgttgtacgaacttgttagtaaaggtgtgtgtgcacatgtgcatgtacgtgtatgctgatgtgtggaccccagatgtctcccttccgtgtctgccctctgcctttattttatttttttatcttttggaggcgagggtctcatactgaacttgaagttcatccttggctaggctgggtggccggcgagcttccggagactgcctgctctcccatgacagtattggagttacaggtacatgacgccatgcctagattttcagtctgtgaatccaaatccgggtcctcatgcttacatcacgtgccgctaatctgctgagctatttccccagctctgacattatcgcctctttttctttttcttttcttttacttttcctttgtctctttgtggtgtgtgtgtgtgtgtgttatctatgtgtgtgtgtatggtgtgtggatatgactgtgtacatgcatggtgtgtgtttgtatgatgtggtgtgtgtgtgtgtgtgtgtatgtgtctgtgtgtgtgcatggtgcgtacatatgattgtgtgagtatacaggcacatgcagacattgctccctctatcaccctcttattgccttgagacagggtctctcaggaaagctagagttcactgggttgggctggattgtcagcagcctccctggatcggtctgtccctgccctgaccaatgtgggtgttgcaggcaccacaggcaaaggaagctttggctatgggtgctagggattcgaactcgtatcctcatgcttacataacaagaactctcacccactccttttcatcttatctcctcatttccccttatcagcttttgaaaatgttttgtcagctgaacatgcaaaggtcggtgcttgtgtttgcttggccctgagttgtaacgtgacagaagtttctgcatgttgtttgtgatactctgtactggtagacttttcaatgtaattccaaacactaatagggcaattccagaagcacctctccttcagggctgatgtttgccacagcatactttcatttgttggggttggtagttatagacacccaccctgtagatgaaatcccacagcccaaggcttcctctggcccccttgtcaattccaagtctcagtacctctatcccatcccctgcctctgtggcctggctcacagacctcccctgaacagccattgaaggccaatatagcactacagaggacttggaagaccctgctctaaaacaagcccagcctccatctagatagcttggcatcttgatgtccttcattttcaaatttcccacaatcctctcttccctccccatcaggtactcaatgcacatctctcctgatagttctaagatgttcaccgaagcctctcctcattggttgcttgaacggctttctctttgctcatgatggctggtgttctaggattgtacttatataatttccttctgatcttaggtgctacactgtaattcaagaaggcatagatactgaggtgaccctcatgtcacttgttatgtaagagtctagaaagccactttggagttggtagagtttttgaggaagtctgtgcatttccttgaactgatttttatgttgtttcttggtcagtgactgttcaaggaacatccccttaattcagagatggctttggggccagagaagagaaaaaatgatggtgttgatggatggctattgtgcagcacacacttactaactaatagcctaccctcctcaacggactccctccacacttagagtggataaggaaacaagctcttgggggttagagtgatttactaagaactatatagctatcgagtggtaaaacaatctcataaggttgtgtgtgtgtgaagttggtgtgcatggtatatgtatgcatgtgtacagttgtgtatgaggtatttgtgtgtggatggtatgtgtataggcatgtgtgtgtgtttatatgtgtttgcatgcatacctcctctgtgtgtgtgtgtgtgtgtgtgtgtgtgtgtgtgtgtgcgcgcgcgcgcatgtgcacaggcatgtgtatgtatgtaggatgggagagtggtgcccagttggaccagtcatctgtttcacgtcccattctcttgaagtccaaactttgtccactgacttcagcaaatcggacatggacaaggctcaggcctttctaaggacatcatgtacacccagaggccagactgaggccagaactttgatctctgtgccaaggatgctctgcgttggacctgctgtgctgtgatgatcagaggtggggtcttggtggctggacttttggactctcttaagtcatttttttctcatttgctgcagctttgcactgagctaggatatttttcccaaagagcaggtcatatgtaacatgtgcctggcgtgagctgggtcctgtgactccttctctctgcttagggaatgatatgtaaacagaaagtgtgcatcaactattgagcatccacaatagtgggtatcaccaaacatgaaaggcacaaaaggacacctacccagataatctgaggcaatgtattctggttatgtaacattctggaccatcgagagtgagagtgatggctaacccccaaaaaaggtatgccattaaacatacgtgtgataacgtcctctaaaattttaatcataacactgcaacataataaacttagatggtaaaatagtagaagcatgtgaaagtgtaggtagtgaccggtgagaccctctcctcacatgcaatggccctggagttctcccggagagccaactatcatatgttccactgtcctggaaagaatgattgtaatctttgtggatgtacaataaatgtacccattatttatttcttttgaatccagttatccatccattcctcataagcctaattctttgggagaaaaaaaataatgcaagaaatgcttaaatttaataatctcttgtttggggctgtgtgagaaccagtacactccgaatagagggtcttgggttcctgggtccttgggtcctgagacccaggcttcattataaagtccctcagctatggaagaagtaacatggacccctacgccaaagatgtccttgatggcttttgtttacataaactacactattcatctcctgggtcctatcttgttgaaagtagcatataagaagttatcctttgtcagtgatagttccagttaggtgcgagtccatggaacctgggcttcaggaagtcttccctagctcattcgttaccatagaagaatgtcaacttataatgttggtctccataggaatacagcctgattgcatatgataacttgctggataaccaaacactctaccaacaaggtaatcagttttgtctgcagcaatgttttccccagttaagtggcaagagcaaagggccagggctgaaagatatctcaccccattcttcataatttactccaaattgcccacaggagaagccaataagctgctgagcatgatccccaaagaatgttctctagagagtaattcagtgtttctgaaaggcatgaaacgaacctgttttatctgttcctatccagctattctggagagctctggactgacccctttagtaggttctagcttctatgactcgctgtgatttttaacagttaagtcttaatggggacataattaaataattatgtttctctcgaatgattgttttactttagttgtggcagatgcctaaccttacctggtttaaatgaaggagattaccttaggttactagctgaatattcaggctccattatgtacagaggctaaatcttatcgtcagaatgctttctcttccatgtctctctagcttcaaaaaagaagcagatgtctcccatgtgggctatagatgttctgaacaatctggttttaatttataacagttcagaaacctcaccaaaataatgtttttatcccccactacttatataaaaaagttttaggactgaatctcacaggatcagcttaattccagtactcaccttacacatcaagttttatgtcaacttgacacaagctagattcatcagagagaatggagtctcagttgaggaaatgtctttataagatccgtctgggaggcattttcttagttagtgatcaatggatgagggcccagcccattgcaggtgatgccattcctgggctggtggtttggattttataagaaagcaggctgagcaagtcatgatgagcaagccagtaagcagcactcctccatggcctctgcatcagctcctgcctctaggttcctgtcatgcttgagtttctgccctcactgttttcatgatgaactattacatggaaatgtgggtgaaataaaccattgcctcccccatgttaattttggtcagagtgtttcagcaataatattcctaactgagacactagcttttcatccttgtggttgtgggtggagcatcctgatattccagggctgagatggacagggcctcagctcctcccaaaccacaagaacaggagtgaaagaaggagaatcaagaagctagaaacaaaaagtagcatcaggccccaggcaggttcaagcaataggtttgtaatgtgaagtccaagtatttttttccataaagggccagttagcatttatattaatatttctgtttaaactacacagtttctgctcatggggaaaaatcctcgtgcagtagctaaactttgaactaagatgtgttttcatgaaaccttgtttatgggaacaatcggtgggctgggcattgtctgtgactgtagtttattgagcctggcctgtcaagtgtataaaatctttttcttctatataatctagaaagttcaacaaatcctacacaatatgtagaaagtattcaatggatattggttaccaacattatacagaagtaagggtaacaacaatgatagcattggtggtaattccgacagcactaacttagcaacaagatatgataaagtgtgagtcatatgtcagtaatgtacgctaggatgctttctttctgctggttgagcttcccctccatgaacacatagaactgagaggcagtgcccaggtaggttacacaaatactgtaatttatagttgagccctaaaatctggggaggtggctcagtgtggtaagagcacttgctgtgcaaacatgaggatccaagttcagattccaaatagccagctgtccatctgtaatcacagcacagagcacgaggggagacagaaaaatcactagagatcactaaccagccagcttggttgaacaaaaatgatgaaattcaagttcaatgagagaccttgtctcatgagactcagatgaagaatggtagatcagtatgctccgattcctcccctggccggcacataagcacatacaggcacatgcccccaacttcacccctaaaaatagatgagcccaaggctcagataaaaaaatgtcacatgcacaagttcacataacaagtttgggtggctgtggaatttgtgtgtttcctccagcccctcttgcagtcttgaagaactctgtcttccaggtatttggtatgcatagtgtatcagaacacaaatatacacaaatggatattctttaatgtctggatccaagcagggaaatgtggaagtattgttaagattcttgccgtgaccttgagctagtagaaagaactgatttgggtttggcggttgttgcatgagtctgggaaactccttgctgctaacatgactcagatgttcatctcacacaaagcttatgaaatgtcccttagcacatttgaaagcaaagaactgatagatgcttggtcactcgctgcattactgtccatccactttgctattgtttgaattggcttagcaggcaggaattgcttaagccactagtcctcaggttggctggtgtaaggattcccctcaaattccccatggctagagagaggcctgtgggaacttcttcgtgccctgaaatttactcatcaaattctctacaactctggaaatctctccctggcttttggttaagcaggcactctgcagtgatcacaggaagtggctaactctccagcccctgtttcccaccttttaggtttatccttactctcatcacccagatccacttacaaaacccattacaaaaatgattttcatgaatcaagaaacaaaccctagaacctttggccctcgagtgctttagagaactaggcagggttgggaatttggtttaccatttctctaagccaggggccagcaaacatttccatgatgagccatggtctgcaacttccactgaggtgatggtaggaccagaggacagaggagtatttgactaggctacccagttacttgagtatagtagcaaaacctgagcttttgatgttggagtgacatgagtttctcctgtggttgtgttgtttggtacatgatttcaggcaagctaaatgttctcaatatcttcatttaaatgtgagagttataataacatgacacagtcctgcccttctagcccttagagcggctcttaggaggatgaagcagaaaatagtcactgtcccccaaagctcttagatgttaatggtatcaccaggaccacttaacctgctgagtgagtgtatgagtgtagaggtaatctgctaaatcttgccacccacaagagttctctggattagcaaatgaaaacacacacacacacacacacacacacacacacacacacacannnnnnnnnnnnnnnnnnnncacacacacacacacacacacacacacacacggataattgagatcagttctgtgacccattaaggaaacaacatatgtggacattattctcatcttaaagatctaggctcttctagtcaccatgcacagtgaagagaactgggctttgatggagacagacaagagctgtgattcccaggcctaccctttctcagctacttgacaacaagcaagttagtcaacattgtccaaacactgactaaaggcattcctcacagtgtacaaaacatctcccgtaaaagatgctgtaaagccctgctgtcaagccagctcttataggctgtgagcacagcacacagtctatagcacctacccccacggtagacttgtaaagaaaaggctgaagtcatagctgggtgtctgagcacacactgagtcattactcttgagagatctacttttagaccattgataataaggagacagcagagaagaacacgaaggcccctccagcccctataacttgccagtcacatgttggtctttctttctgcattgcctcagaagtgagatcaatattgttttcacatttgtccctagggaatctactcagagttataaattatgtgacatccttggtaaaataaaagagattcactgttaaactacccgatgcttacgtttgaggatggtttcatctgtacagagagggaatccaattttagaggagccaggcaagagaaaatttatattccactagaaaagcatcacagagttcttgatgaagaatgttaattgatacttggtgtttttatcaggaaggcaatagagactggtggagactgttgtagtggagtcttgttgaaagtttttttttttctcatttctaactgacagctaccactcagaggtgaattacttaatggttatgtttttcatattttaagagatgtaaaatatggattttgaaatgaaaccaatctgcctttatgtgtggttagttcaaacataaaagcaacagccttgagccaaccaggtaagccactgattcaagacaaaaccttgccaaacttcaaattgaagggtttgtaagttgagcaggaacaaagctttcttcagagactcttggaaagaaaggcctttaacctgggtactcaggagtaaatgttaatgatgcagtggccagcacggtgcccttacctcttccagatagagagttatgatttgttagcatcttggactaagggaagaacaaaagttctttaaacaaaaatgtaccacataatttttctgggtaggttatgatgtaaacctcttctctttctctccataaagtacagtatctgtctcttactaatgaactgcagagttgggtctggtctcaagtaaggtacaaaaggctcagtgtatgctgaacgtagcctcagaaaaactgggagatcgtgggtggaggaagaaggcaagactgtgcaggacacaaaaagcctgacatttctgtcttcactcaaagcccctctctgtatgtgagtccagaggtctttttcaggaaacactgtagacctcatctaaccccattactgcattttgtcctaatgtttaattcaatcttccagttttactcaatacccaataaatggctgccactgtgcatgccatattatagaggatccaacaaagacagatgtgatctttgtttgcgtgtcataattctgagttgaccatgtaagtattgatgcaggaaaaacatttgccacgccccaaattgaagtttttacaaattgagtgtgagtgaaactttttttccagtacacttggaataagagccttttaactgagatgctcaggagtcaagcgttgatgatccagtggccaatatggtgactttttaccacttccaggctgatctgttagaatgactccatgatgttcataaaaagtggtaccacgacttcctgctacatgtaaaagacctagatgcctttggcagcagcatccttaggtgctacctgggaatcctgttgacttgtaggccaagagacttaagacatcctttctcatgattcctttatgcatcattctgaaggcttgtatatccataggataaactacttactccatgtttgactgcagaaggctccttcccttgcttctataggtgtctcgtagattccgtagacgtggatcactctaagaccctcaaatcattcctccctcgcccctttgtaccttacttgagaccagacccaactctgcagtccattagtaagagacagatactgtactttatggggagaaagagaagaggtttacatcataacctacccagaaaaattatgtggtacattttcgtttgaagaacttttgttcttcccttagtccaaggtgctaacaaatcataaaccataaatccctcaccctaactctgcacctcatatgcaatactgattcaatatctgtcaattcagccagtcaaaaatatgttaaacaaacaaagttatgcctgcagtgaatatatatggacctcactggtgtccttgtcaatatttctcaacctcagagattaacaattcacaggacagtcacgttacatgattcaggagtttcgtgtaaaaactaggccattttctctaagggacttttttgagtcctgaaattttggcatcgtcaggagttccaacacccatccacagatatctggttcggaataacaagtatgttctttccatcaagtctagtggaacctgcactgaggcatgaagcaagacatgtgactgggacaaattgtgtaatataagattggagagacataaaaagcagattaggggctctggaaggaactactccaagcacaacttcaaagagttgatgagaactctggtctaaatagggactaactcctaaaactccatgaactgcctatgtagattaaaaagtggggattgaagccttcgagacagttccacagctaaaaggttcttgctgccatgcctgacaacttgagtttgatccctggactcaacatggtgggaagagggaactgatttccacaagccactccttgcacgggtgctgtgacgcgcacatgcgcactgacatctccaccccacccaagcccgagtgtgtgtgtacacacaaacactttaagaatattagtggagatggttgaagaaggaagttgtattcttcctcattaatattgagcaccatgaaccaagctctccccacaagctctgggtatgagaaatgaccttttcctctgtagaaagaaatgtcttggtataacttcattcactgaaaccttacatatcaaattagttgagacttgaacactcaggcagtaagctggtggaatcaggagggactgaacttttagcaaccaatcaaaagctgctgctgtaatggcttgtaagaaagaaacaaagtaaggaatggtacaaatcctgtgggaggagtgaaatgcttgcttggatgatgggaggtatttagaggcagcctattacccagcatacagaggaagctgtacttttagtctgtattcatccaggtgatcaaagggggaagtaagttacagatctaagtttctgctggcatctcagtaagggatgctggcacgtcacagtttggcggacacactacctctgaacagggttctagaagttgcagatgagtagggattgacaggggactctcaaaggagaggaatgtgtgctgacctggccttgtccgctctctgctggttttccgaatgcagatggttctggcttcttgtaggataggactttactgtttgccattttcgttccctcttctctaattgtgttgttccattctcagacttctggattagtctatttctcaaaacagagtattgcacagaacttgtgacaagattatatactttatctatccatctgtccaacataaagttatcaaacatataatttccacataaatcatgctaactgtggggagaaaatatgagcgtcttattccagcatttgccttctgatgggggaaaacaagccataaactgcgagtgaggccttgaaaacagaagatatggtaacctgggtagggaggatctaactcttgaacttgagactcggtggatgcctttggatgaaagcatgcctgagttttgaaggtgatgtagatatcagttaagaaggctgggctggatagagggatgaaaagggtactttggccagaggagacaatttgccggaagtcacatggcctttactcatctggaaatgggtccatgttccctgtggctcaggacatactgcagggtctccctattttgttggagctgtgtgaggacttcagataacagtcccatgttccatgaacgagaggtgggtagcaatgatgctggaagtgtaccttcaagaactgggctggccagcatgctagtccatgtctaggccatgtgtcatctttatttttagaagcgactcccaatttggaatggacaaacatttaacccagccctaccctgaccctaggaactaactataccttggtgtgtaggtcgttatggaagtgtcaggtgtgtgaggtcaagacaacctgaagtgtctctcttcaggagggtttccctaaagtacagaggggtcatgattgtgctggctagttttatgccacttgacacaaggtaggatcatttgggaaaaaggactctgagttgaaaaaatatatttagagaattgacctgtatgcaaatctgtaaggcagtttctcttgatggttgataaaggaagatctagattactatgggtggtaccacccccaggcaggtggtcctttgtggtataggaaagcaggctgagcatcatagggagcaagtcagtaagcagtgttcctcactggtctctgcatcagcttctgcctccaggttcctgcctgagttcctgccctgacttctctcagtggtggagtgtggcctgcaagtgtaaatgaaataaaccctttccttcccatgttcccttaagttgaagttttcacagtaacagaaagctaactaagacactgaataatggttcgcctgatgttccatatgagactgtctggttattctaccttaaagagggccaaaggctgtgggaatttcttgggtccatcttacttggttaaagtattgtaaggtcactttgtagctaagtgggcttactaagacttaaacgtggctggctagcctgtcatcacagttgtcgcgccccattggaagcatttgagtgaaagggaagaaatcaaatccagtgccaactgtgtatcaaatactctattggtgcctttgcaaatattatctcccagaaggtctcagcctcctgacttgggacagcttaggccgtgctctaggtatcccctcaccattcagatacaaagcctggaggagctagtggaatgtgtagcaaccgtggtcattaggaccttgccagaaagcatttctgtggcttaatgactaggcactaggtctgaaaacggatcagataaaggaacccggggagactttggagtctgtaatgatgtgtgtaggatttgtgaagacatggtgactgtcagagagaggcttcatggcttagccaagccttacgggatacagcaagcagagggactttttgcatgctgtctaaatttcagtctgtcttagagtgccaagccctttacagcaataatgaagggtctcttgggggagctggggaaatctttgttgagggataatgttagccattctcaccaccacgtgatgtatgtgctcagaaggagtaccacaagcagaaacacaaagggggaagccagcaatcgtaatttttgttcttaagggtcggcctcccaggaaggtgatctggtgatatctgtgccccattgtgttttccagacccataggactggggctggactggggcaatggagggacagagaaaaaaatgtgttgtagacttcacaaactcagggcaaaatatgcaggcttcctggggaatgttctcttgccacctcactgagagagtgagggaggaaaaagaaggattggtgccacatgaggcgacatgcaagtgtgccgcaggacatcggaacccagcaccacatctaatgagcctgttattagaggctcttggcagagcgaggagaatcgagtgctaatgaaaagcagatacggcacaaacttagcatctctccaccacgagctctctttgagtcctggagcataatttacacaataagctggatttgccattgaaacaggacttgcgtgcatgtttgtgagagggggctgggtaacagttgcaacattagcagctgtttaactaatgcagtggagaagctaaggttaaaagaacttgtacgttcatggtaaaggtttagttatcccccacccctgggtgtcttgtcattacccttactttgttgggcaatggagaccaagagagagggtctggctgagccagcttccagtgttaagaatttagtgcctgctccttgatccaggatgtacccaagtaggaacagaggtgactagcattctctggggtgcagctcgggagttgcggtaagagtggggaagaacacggcgctgtggggttgctgtaccccaattccctgccttggtgttggaactccttttcaccctgttctatgtgcacagtgagtggacattaactaaaggatgcacacacacacttgaagtgaccgtgttgatgcaagggaactccgtagatcaggttctgccctttctgttcattaatcaggatgcaaacgattacagtattgagaacttaggccctccatctgtccatcttccttccttccagtagcaggcaggatctgggacaatcatcaaaactctgccacattcatgatggcactaggccccagcattacttatttgtcagccatctcaatcagaacacatgctaaaatccaacatttagatgtaaggggttatatctggtgggagtttttggttctaggatagctgtacaggtggccatatcatatttagtttactgacttgctaagctaagaacagatttcagaactcaaagaggctctgcattttctacaggctgatgctcacctatgccctagtcacgaaagctgccctgaccacttgatatagaagcatatacccacactgtctttacttctgtccagtgccgtcaccactgcagtaagcctatccacttgctctttctcccaactacacgagagcaagagcttttgttctgggtttattttgtttactgtactgctttcagtagctcttagagagtgggaactgcactgtgatcccagatgaaatccgaggcctggaggccaaatggtgcaggagtgctcaaacagtatgttgccaacatctggagaaaggagggcatcctggagaaagccgggtatctctcaggaatgcatttcaattcccagtttgtgcttatgtggaaggtcacaggcttgctctctcagggctcatagactggtaaaggatgcaggggtttaagctaagaaagagctttgagatccaggtcaggaatgtatccctccaagagacctttcctaaacacccgctatgccttccctaacctgaattagcataattcttgagattcctagtagcaacccattcaggactttatcacagcccagatgtgaagcagataattacagttcaccacactttctccccttttctaagcagaggctcttattacagagtataatgtctgaccagtggagaatagtcaataaatctatacatgttgttcatcattgctgctgtttgtttagtaaccagcacatgtgtatgttctaaagcgatgtaggctcagaagcagctctacactgtgctatgtaatcatctttggtattaatgtttcacattaatattctggaatcttctccttaggctccccttgtggcccaagagatgcagcaaatggccagacttatacatttttgcgtatagattggtgagctccttgcatccctggctgaaactgagtctctgatttagtttaaaatgtactcactgtgttgtcaagatggctcactgggtaaaagagtcgttgtttaagcccagcaacctgaaattaatccccaaagcctgtggtggaagacaagaactgactcctgactggtgtcctctcctttccacaggagtacggtggagccccccaataatgataataaataaagttagatgttcaagcttacttttcacacgtatatttcaggaactcagaagccgtgaacatctgcttagttctaagcaagcaagtgggagaccttctaagtaagcgctgtggatgcaggacatcttgatgctgccactttgatgtggctgttttgactcagggtttccgggacatttttgacacagcctaaaaagcaaatgattaagcaagctgcaattttgtatagcaaaagaaatgtgtgcaacaggcacgcaaacccttctggggttgggtgcagatgtgagcctaatgtctctgtgtttccactttaccatgactgttttgatgtctaacactttcatgacatcatgtgggacttgccagaatgtttgctgtcaatacttgctagactcaatttaatggcaagagtagacaggattctgatgtcaatggcagcagggtacaaatgaaactgaaggcaagagggatgatgatctgggtgggagagaggggaggaggtgccagagtttggggaggggctggctaagaaagtatgctcactgtttcagcacatggactgcctctgttcctcatgggccattttctagttttgagcttaattttactgcacagttctgtctggagaattgtttaaagatggaaaaagatcccagtgcaaaactagaaatgggatctgtctgtgctctagagatggttctggtcattgcctcctgcttgctgcacggaacactttgtgtgtgtttcatttggcagtgaaggaggtggcccgggctgctcgctgatccctgtgaacatgcagccacactgctttctttttataggtggtctgagagatcctcagtacccgcctgtggcttgaagtcagaggttgtctgcaacggcaatttagtaaggagaacataggggacactaagagcttttaagttttgactacttactttcaccttagtttcctggcagaccatgaagtactagtcctaagttttagggaattttgatagtaaacacattaaaacagcttgctatgaataagtaagccattgtgtttaggtccagaaatttagctctgagttaaattctcaatgtcttgttggaatgctggggccactagataggtcctttaacttattgtcatctctgcaaggaccttgataagcctgtcctcttcttcctgttctctagagaaagatactgcctgtggcaggcaccacaccactgtatttttttgagcattttgtctacgtgtatatgtgtgttgtgcaggcagatgggtgcacatgtgtgtgtgcagctgtgtgtgtacatgtctgcatgtgcacgtggaggtgaaaggtcattcttcaagtgccatcaaactttcttttcggaagcaaggcctttcatttagtctctcactagtagactaggctagccaacaagccccagggatctacgtgtctgtgcctccccattgctggcattataaatgtctgtcaccacaaccagatttgtgatgtaatttctaagaaccttgctcatggctccctgctggcagggcaagcatcttccttattgagccatttttcgtctccacctttactaaattttcatgaaggagtagcagacccttcccttccccatattataatctggggattataatataatctggctcctccaagatgagatgtctttagagccctgttctatgactctggcttccagttaaaaaggaagacacacattaaacactgtgtcacacagctagcaagcaaagagtgaggacttagatgcttgaagcccacactcctcccattatcattagtgatgctgccaggccattgctttgcaggaagatgttacttctgtgaaggtttgtctagtctggtcagaatacctgagcaagtgtgccaccctccttccttggaaggcactgtcatgctatctatcaatgacgtgtccctccaggtgttgctgtcttcccatctgtttttgttttttttcatccatcaaatgattatattggtaaataaatactaccaaaatatcctcattttatcaaagtgaagatgtataagcttcgttctaaaaaccttactggcctggaggtgatatggtgggggaggggaaaacacggtcctctcttccccaacaggggttctactgggcagactcccaagacagcttgcatttatttgggacctgtcatctggaaaatggctgggtgacattcaaacatgatagtgatccaaaggctgcctgcagccacactcctttgattgagtggcttttacctgtgggcagtttaccagagttctggttatacaagtgacattttaaaaccacaattgactgacctttcttttagctgtatacagtggctttttcagaacagagggaaagtttgagttaccagcagatgtgagtgactttcacctgtgtgggatgtggaagatttgaacttgggggcatcctaattttggtgcaattcaggccatgactttcctgaaaaatattacacaccccagccccttgttattaagagaatgaaagagcgcaaaattcggaacttgatatatctagatttgaaaccttaatgtcctgttgattttaaagcctaccccagtaaaatggaatagagacagttttctttcagagtcagcaagggaatgactcctgggaagcccgactatttttagtggtgctctttttcttaccgtgggaatcaagggtaatgggggtaaatgtatgcatctgccctatggtcaactgaaatgcagtgtgacctcagcattccactttcatcttcctactttgcttaaaggagaccccgattatctcagctcagggagtcgctaaccaggagcttcatttctgttgcagtgccaacaatatgcccaagcaggtagaagtgcgcatgcatgacagccacctcagctccgatgagccaaagcaccgaaacctgggcatgcgcatgtgcgacaagctggggaaaaatctcctgctctcactgactgtgtttggtaagtgcccgaggtctctatactcccttctccaagatcacgccacctttttttccattgctctcttgatttgtatgggagctagcctctcagagtggacttcctgaagaaaggaagacaggtgactgcctcaatggcaaaaatctacccctaaaccaactctagccatctcttctcctctgcagtctgtgagttccctctaatgtccatagacagttgctgtgagggtgaacatgcagcttcccagccatacttgtgaagactgtgttgagctgttgggagacaggccagggaatccgcaatgcagccaaccttctgaacgaccccagaagcaggcaatcagtatacctcattcggagatatccttgcatcaagataaggacaacagggccagaaaaccccactaagaagattaggcctttgccagaagcatcgttaacgttgattgattgatcgagttgtggaggggaccatggaagaggcccactctgatgctcagatatgttccaagtcatcttggaggagtgccccctgcttcaagccactctggggatgtttcctttgtctgagctgtcattgcagtcttggtgttgggttttctatggggtgtattgagagcagaggaaatggcagtttcttgtaatgacagctgcacagtttctcttcccaattctctccttgttcttcagctctcacttagactacacagagaaacagctaaagttcatctccgtcccccaccccaccccacacacctcctcaccatcatcggcacactctcaatctcccccataccctggaccacctgtagcatctcagctgccagtggaccacaatcaaaactgaggattgcctcagttcacttagaaactgggaaccacagccatggctgggtttttaagaatcatacactatgtaatcaaatctcatccaccctaggacttcaagaagattgacagtagaggtgggaaaaggatctgcccttcagctgcagccttctcttcatgtccctaaaattaactccataacccacatgcctagcacctcctacccccatttccagggggtctataacctagaatgtaggttatacttttgggggttatgttggccagccattttcaacagtctaaagttgttctggtggaatgtaggagtctgtaaagcaaacagcatccctgccagtgtctttgcttgacttgactcttctcagatgatatagagccttagagccctgtcctatatgtctgccttccacttaaaaaggaaagcatacaacataccaaataccagatcccattggcagatctggctgagagaaaacaaaaaacaaaacacaaaacaaaaatgatactgcctcctgggaattggttcttctgagaatttgtgatgctatgtgcaatcaatacctcgaaagattttggagtcaagtcttcgtttttcccatgaagtgttaaaaaatgttcttctggactcctctggtattagagtaattggagctgttacagaaaggtgtcttgctggttgtcaaaaatcaatgtcccttatgtaaggtcttcattttgaggtatttgtagtccattagccagacacatgaaaaagatcacaaccactggaaggaatctttagagctgtttgtttcactagggaaaaaaaaaaccctgaattcaggttgcctctttcccttcaacaggtgtcatcctgggagcagtgtgtggcgggctgcttcgcttggcatcgcccatccaccctgatgtggtcatgttgatagccttcccgggggacatactcatgaggatgctgaagatgctcatcctccctcttatcatctccagtttaatcacaggtgagagctccttcccagtgcctgcccacctatggcgaagcccagtgctggcttccggggatcaaagtagactttctttatggctgagtcagtggactccactctatatcattgcatctctgatggctttcctgtctctgaaataggaatcattgatcctaaaaagaaagacaatagatctgtcactcactttacctttccttctaacagtcaaggattcaaaggaacagccatgtattgaaagtgatactatcttgctatttcatttttaatattctcagcatattggaagatgatagagattgtaaatgaaaaaatacactgcttttattatttacttgggcatttaggaagatatgaattgaaaagagattaaatgctagacatgaaagctgaaggtgttttaatagaaagatatacttaatatgtgataacattctttcttatattttttggctaaaataattcattgatttgattttttttcctatgtttgaactcatgctgataatttttttcatataagacaatgttattggaacagggcatgatgtattgcttagtgtccagtttggagttgatagtggggggctccaagctggtcatagctagttgccaatgagtttggtggccttcagagctatcctctgcactgatagacttggaggttcagtgactccagctgactcccacactgggccaattgtcccatccttacaccagaaacactagctttcaggtttaagtgttcaggaacctgaatttcttatcattaagctttggggttgaatggatccgtgcttctctccagaccagagaagatgttttcaggcctattcaatatattatatgcaagccagcctggtagaaagacccggcttcctttgcccagatttagcctttgggttctagagagaaattggtcatacatgggtcacattaattcagagaaatccacaccaacatcctccctagcatgaaaaaaaggacagatccccagaaatgggttctatctctccatttagtaaaggtaggaactgaaaccaggaagtaggcacactgaagaaacagctggagaaaaagccccagcggaggctgaggtctgtatgacttgacttggagtttcctctgactgccctcagtacagatgctgcacatagtgctggcagctgcttctcatatgtgctctccaatagccacatgaggttagacatgagaaccaccatgcttcaacacaggggtgtgggaggatcatgctgggtctccatttcagtctcttgtagtatattctaaagacatttgaccatgaccttgatgtcccagcttttgattctcctaaatgaggacaatgaatagtaataataacatatgatcgaaatgctatccttggcttaaccattgcttcagagaagaccattgaaggtcatgaaaatggaaaagacatcattatcttagacttaaaaatggaaaactcttcaatattattttcacatatatactagtgattgacatttaggttgaaatcagcgatatgtaaactatgagtcaccgactccccaggttctcaagaatctcaaaaataaccccagaaaatagaaatgtaaagtgtggaatttggtcacatatttagtcagaggagtgctagttaaccactaatagatctgaatgataggaagccaggggggttgtagatgtgtagagatggggacatgaatagaaaagaacagaactgatctttgtggatttcttttaaacccagggttgtcaggcctggatgctaaagccagcggccgcctaggcacgagagctatggtgtattacatgtccacgaccatcattgccgccgtgctgggggtcatcctggtgttggccatccacccaggcaatcccaaactcaagaagcagctagggcccgggaagaagaacgacgaggtgtctagcctggatgccttcctggatctcattagaaatctcttcccggagaacctggtgcaagcctgtttccagcaggtaacccaaatccccggggttatccctgtccaatctctcacctcatccgtgatgattcagagaccgtttcaactctgatagcagttttctaaacgtgctctgatctctgtcaggcttgagtgtttcgtgatatgctctggagtattctaaggctagaatcagatcacctcatttctggaatatttgttgcctataaccttaatatcattctgagattcaccttttcctttcttctttttgctcctgtctctcagttgcacacagacactcttttaccggtcttgttcacaaccctctaaattgcccagtgcttctcaacactattctaaagctctgtgtcgccctgaaaggaaaaagtgcctgacgtaatctgtcctacaaattgagaatctgtaactcatcctcaagataagacaggggagtgagtgtaattttttagttgtgaaaacatcacacatctatgatcctagcagtgggaaggcagacaggagaattcctggaacagtgaagctaagtctacaagttctaaattcactgggagatgctgtccaaaacataataaggagaaagaccaaggcagatgctgatatcagccattgattggccttcacatacacttgcacacacatgcaagcacaaccccacaagcttataaccttaaaaaaaaaaccatataatcctgctaaattaaactacctaattactagcccaaaacacactcactgttcggttttctgactacagagccaggtaagattgtcacacacctcagatcccattagctcatgaaaagactaaactggagcctaaactggaacgaagagttcttcagtcattctcaggcaagcactgaagaatgaagttataagacagacagcttagaagaaaaatctgatttcccacccttaaaatgcagtgccaaataccactgagcccacattatatcaagctgggatggggtttttttttctaatttttaaaagaaattgtgaatatataaaatgagaaatttgctcatcatcttgatttttttgatcagtgacagtatgtttggaaatatcccatatgtatgtattcacgtatggaaacatcccactattatatactataaatacgtataattaagtcaatgaggacttaggttaaagaaccccattccagactggaagagtaggaggaggagtgactagaagctagagaaaggaatcttactgaggtcccctgttcatgtgcttgctagcctcgcctcggaggatggtgtttcttgctttggagtggtagatacaagtagctgcttttgaattttgaaatttttgaaatgtgtgctttggagctatggatcctaggaaatttgctaagagaaaagaggtggggaggcacgagagctcccaggaaggacagctatggatcttcttcctgcaccatcacatctgctcagattctttcatttcagcctggggaataaggccagaaagccccaggcactcggagccattgctctgctgttgttggatggagcttctataatgctagccatattcacacttgggtggtcccgaggctgatggtgggctttgccccatggcaaagcatactgtctggactctaggggatagaaaactacatcaggatgtgctccgtccctgccaggatcttataccttcctatggcaacctagttttgtttcctcagctagggctagggtcaagagctctttgagttggggcagcttgaggaatagcagtgtactgtcctttacctgacattgtgaatgcaagtagatatttaccctgactttaagggccttgaccagagaagaccattcttacagagtaacaaaacagagatagagaactgggtcacttagcatcctttctggatccccatggcctggcgaggagtgtttttaaatgacctatcttgagtgaagggagattcctgactagagttagaaaccggggcaaaaagaggaaggataattgttcccattagaggcagtcttccgtggtcttggcttgctcaagttagaccctccatgtttaaaaccaaaacagcctcccatctggttttaggaagacagagctcagctcaagtagtcactagtcaggtcaaattcaggtccttattctaagaaagcttgagttagggaaataattggttttctattgaaaaacaaccagtgtgacagctattgatgtaaacaaagctacaagtagctgatggcaggaggctggtaagaaggaaggcatgtaagtcaactaggagatacttgtgagttttctggcaagttgggctcaggtgccacagcaggtatgcagatggagtggtccaaacccaacgtgtttgtattcatgtatggaaatatgaactgagacctggacaactgaaacaccccttcagttgggaagctagattttgaagtctagcatgattcatgttgtgtctggcttcatcgacttactagaaatcaggtcttgggttatttgtaggacatgaaagatgtgagacccttagcaaccagcctcctaccagaccctgcttgttatccatgatgatcactatagagtagtctacactttggcttcttcatccctctcaagataagtctccatctttgttgcctagagtctggcagctacatccagaagtttcccttctggtcacttctgtggtttctcttcatgtttctattgcccagagcttggatcattctctgcttatgtagccaagtttgggtctcctctgaccctgctcaagtgtatacagccaggctaacacgggaggcacctgcctcctcctagagaagtttgcctgtccttcttttctgttcttgttatctcagtccagcattgctaactgtcaaactcagccacagaaggatcaagtctgtataacttaacatatggtgcagggggtggaaagaattcaatggtggtcgggccatttaagttcaagtgtcagttctgccaataactatgacgtctgaaaagccagttcttcctgcatcgtcttctgtatctattcagggttcagccatctgtcacctctcacgtgccagcacagacattctaggattttgaatgatttctattttaatgccctggaaagtggtaaattttgaggttgagatgtgaatttttacatgcaggatgcctgacacctttaaaattagacccacttccacgaatgtcgaggaatagcataggagatacttggggagtattaggcaagagtgagttggcttcatagcctgaagtatatatttcccaccttgcatatgaattatatagtcccagaaaggtggctattgggtagctgtcaccctgctgtccagatggagattcccagcagagcctggtattggaaggacccagaacctaggacaggcttctgatgattctgtccagcagaaagaacatttacctgggcctcacagtttgcaagagcagctactaagttggacttgtgataccatcccccaatcacagaggtgtcatcatggggaggaaaaaatggacacatatcccccagctatagcaactgtgctgcttagggtacttaggggacaaatgaatatcataaactttgtaataatcttgttagtaggatagctgcaccatactgcatatgctacacttgatcttagccaaaaggccgagaagcaacaacatactgcatatgcaatgagttaatgctctattaagaatataatcataaaatattccccagttttattagccttgttttggcatttcatagttgtagttaacatcttgggaaggttcaagtgtatgactggctggctgggttgttgttgaccttttagactgaccttcacctttattctttttccttcctgctccattagattcagacagtgacaaagaaagttctggtggcacctccatctgaggaggccaataccaccaaggcggtcatctccatgttgaatgaaaccatgaacgaggcccctgaagaaactaagatcgttatcaagaagggcctggagttcaaggacgggatgaacgtcttaggtaggcatagtggttgttgccatccatcacctttgacttctggacagtggcccgcctttctcaacagccttcttccctcagttctcagtatcccaacgtttcttctcaaaaaacccagtaaagtgtcctctaggtggcgcagaaggttctctctggggaacaatatgagtgtcactgagacagggctgagccatgaaggaagacaggaagatcagcagaaggaggaaccccaaagggacatggcagccagagatcaggggtagaaaaagagaaaagagctgacatttgtcaggcacattatttaactagccatttaatgaactgggctatgcttctcttttatttattaagttttgttttagctgtctctttgcagaagcaccatgcttgttgttgcatcctagcttcaagtctataacaaaggcagagttgccagtattggacagtgttagattaggaaacaaagggctattacagaatgtatatgacctgtctccttgagcctgatgccttctctccattccgtccagagttcctctttagctgcacagatgtgggtttaggaggcactcattggttgtctgctcctgggcaagtctttctacttctctagcctccacagtaaattggaaatgggattggcccagggtttgtgaaccgaccgttgtaaaaatgaaccggagctgtgcctataaagcaccctagcacatgcagtgagctctgctcagacaagctctggtcattatgaaaagtagatggagagccaagaagctcaaccagaacacattccatgaagtgcagggggtgaggtggtttccttcacaggatcagctccaaatttgcccagacttactgatcacccagccaccttagggctttagggtgggcccattctctcccatttccatcattgttcagtttaatggtgttaggaaaatgggtcgtttgcctgcaaaatggaaaaaaaaagagaaataagaatctgtaagcaagatcttgcaaagaagtttctaaggactcgggtgagaactgtttagagatgggtcagctcagtggtcctgtccctttgtcatctaagagatcaaatgtgcttgtctccttggattgtcattagataaacttgaatttttagatcaatacaaataacaataatttagtctaagtatgtcccacgtgctagtctaaaaataaataaataataataatattttttaaaaaaggttcctatgtaggatgtgatcagcagcgctgtgtgattgctttgtgcactgtggttgttttccgaggacatcagtgctgaacagagaaggcggcagaggagctgggcaacccagtgcctgcagggctgaagtagatgctctttgtcctggaagaaagcccgttgggtgagagggagggaggagataagctgagtgggttgccaggcaacaaaggatcagtaaacacagttgataatcagtaacaagccagaggtagttgggggggaggaggaagtgagagagtcccgctgagaaggaggcatttctgataacccagaagccgctttctccactgcaaagatatctacaatcctttcagggccttctcaattcccgggaggcccttctggtgggtcataactttagatcccatcctccttgacaaagtaacccctgatactttggactgaataattcagaggactagtctttccagagtcttaatggattctagaaagtcacatgacctgtggctgtgcctgggagtttcaaaatactggcaaccccaaccaagtctaagagggctttgttcaagtgaagtacccctgttccagtgagcagtttcaattaggcaatgtttacccagggcaatggcaggctgaatcccgcatccattcaagtacacagcgaggcactgcgaagccaagggaagtcagattgttgagaaacttcccttttgccaatcccagctgaaataaggttcttttcatggccttggaagggcagcagcagtggctctggttttttgttttatttttctgtatttctggtcttcggtttttggaaagccccaaggactgagaactgcaatacaggaaggtgcaatcttggctcagccttctgcttctccaaggacgtgctctgctcctaagaaacctggagagctagcttgtggtacagcatacctatgattccagccctcagaaaactgagacaggaggatgattaatcaaagaccaatttgagctataagtcaagactgccctcaaaaaccagccaaatagatgaacccccaaaccaattcttgatccccaccttaactccaatagcttaaattggtgccaactactctctatatatatataaaatttaataaatattatgatttgattcccttagacacaaattccttctctctgaacctctgactttatttcccctttggtaaatatatatatatatatgtatatatatatatactcatagatacaccagtgtctgttgtttccaaggagagtctttattctaattctttgggactctaagacattgtgctttattcaatagcaccaactaagtaattcttgggcttctcagtctttggttctcactccccaaagccacccttcttttctacatcaagcattaatcaacctacttaactagtagtcctcacagatggattcggtgtcaccacgcccaacaaactgccctccacggtctcagagaagggtggaggaagagctgagaccagattttctctggtactgtaacactggttcattctgccctgtaccctgtctccactaagtcccattcttttctgggggtggggggcaatcactcaattgtgatgtcacttatcaatccctcttgtcaagagctgaagaggggaggtgttaaatggcaaacattagcaatctgagtacaagggatgtattattttcactaaagagagatgggatcccaccaagtgtagttaagtaggttgatgaatgcttgatgtagaaaagaagggtggctttggggagtgagacccaaaggactaaataaagtcagaggttcagagagaaggaatatatgtctaagagaatcaaattccaatgctgtaatttatctgataaaagacaaaaaccctggatagagtaaggaaagactggaaagtagccctactaaatggagtagggtagggtagggaagagtatggagagagagagagagagagagagagagagagagagagagacagagacagagacagagacagagacagagacagagacagagacagagacagacagagagacagagaaattagaagatgcccaatacttcaggatcagagaacaagctaaatggacaagcaatgccctgtagctggaagaataactgtgacttatactccagtatgtagtcaaagtcaggtcaccaagatggcgggggggggggggtccaggaacacacatgattataactgaaagtctagacagttcccagggagtattgagaatactgttagccacatagtgtaccccagtcctgatgtgttagcatgaggtactgaggttggaggtggttgagagtgaatcttctggaaagagaaacgaggcttgaggatctaaagtccaagggcagatcaccaggtccttagccacaggtgagaagtcttgagtattagatttgcctcaggatgtggtcaaaagaagctgccactgagagagagggtagggagtgaacgcctcagatccttcctgccttggattaggattggcactggcggctgatgtgcagttgaagtaggatgtcaagaaaagagagaagatgggtgacagggcaggtattggcaaaaatctaacaatgaacccaacattctggctttatcatcctgaaaagggttaataaacggaaggaagcataataagttgacttctgaaagggcagttaactggggcttcctagttaactaggatttcttctaagttccggttctgtcactcttcttcctccctcatttgctttgtagctggagggaattccccaggtgaggtatacctcagaatagtacctaaaaggtctagaaatttctccagcaagggctagttgtttctgttcttccaatcatggttccaaagtttgcatgacaatccccaagtcccgacagccccttccttttaatctgtgtggtaataggagctgtgcacacatgatttgccaaagtgaggaggaagagaagatagcaccttgcatttgggaatgaaaatgaattcattttcttcaaggaaatcacacctcaactacttagagtttagtttgttcaagtgaaaaatgtcaaaagaagcaataattatagaatggaggcggggcaggtgttcagtgtgaaatgtaatgctttttttcccttctaattcctaatttatccaagggtgactgacatgtagaattggccctgtacatcaatcatgctaaagtgtgaggggaaaggaagccaatattttatcatttgtccttctgagtaatgttaattgcccataggtctgatcggattctttattgctttcggcattgccatggggaagatgggtgaacaggccaagctgatggtggagttcttcaacattctgaatgagatcgtgatgaagttagtgatcatgatcatgtggtaagtctgtccattcatcctgacttcattgtaatggcgctgtggtacgggagaaagccttggagtccccagagaacagtggagccctcccagtatgaagaatgggtacagaccaaaaagatatggagaaaggggtgtaaaactcttctcccttctcccttccctcttctgcttccctttcatcccacaatagtgctcattgggccaaatctgacatatcacctaatcctgtgtatccttcggcttgaaaatggattttagtgtctcacacatccatcccagccgaagctggtgaaacaaagtgctgagtgctaaatgacttgcacaccccagatatttctcccagttcaggagactgcaagtctaagatcaaggtgtctgtataatcaatgcatagcacattcatctatctgagttctgagagaaacaactcagagtaggaaaaggagggaaacaacctcctgggttctcttctagagcattagtatagtctatgtccattaccatatcaaaatactacaagctaggtaaaattataaataaagaaattattattatttttttaaactataggttgggaggctgggaagtcattagcagatttactatctggtgaggggatggtccttgtagattactctttctgtgtgctcccccacacagaaagagtaatctacaaggtggatagaaccaacaggcttcagtaaggctctcctattgaaacgctaatcacattgaggagggctcactgccaagtagcccatcttccaagtcactggactgaggctatgactcttccaaaggaatctgaggggacaaaaccattcaaacttagtagacaccagtctcattcatcagggtgttatctaatcacctccaaagcccccactgctgcacatccagtagtagaatataaacatttaaataagggaagggacatactttcagttcatcgaaatggcgaaggaaagaaaaggaaatgaagaaaaagaaaaccaacagattaataacatcccatagtacaaaaattaaaagttcacattatctccaccaaactgaatgtggcgatgcatttgtggttgattctcatcaaaacttcaggaatgagaagctgactgggggctttgatgcacaataagataactgaaatattagtgctggcatgttcaccacctcattgaacttttaaaataagaagggagaaagggatgctggtaaaaaaaaaatgctgcattctctgcttttatggttctggaatctcagttcctgagcagtgctaatatttaaatgtttcttttgtgtgcagacctcagctagcgtgggaatgccatgtcctttaggtccatctgagtctctggggacctgaggacctggtagacagtgacatacaatgcagcaccagcttcttgcttgaccagtacttcatgcccatgttgcctagagtctccagcagcctgcacatcccctctgcagtaaatatgcagttcctctttctaaaggtttagcaccttgtgcccccatcggtggggtgggtaaagagggctgtgagtcagacctgaagaaggaatcttcacagatttctactacctcatctaggaaggcagatggggcttttatgactgaggcccatttttttatgaggcccattcccattgttcttcagatgtctccccagcatcaccactggataactccaagcccgtggaaaggacctgggtaaaatcactaagcactcttagctgacccctggaggctaaaatcgccatagtctttgtgtagtggtaagaggggtaaaaatagcaaaccctagcattgtgaagataaggcagtctgtattattagtttcattttttaaaaattgttttgagataggctctcatgtcgtctgagctaggatagccaagaatgacctagtggaccgtctctctgagcactggtatgcaactccatgtctggactaaaaattatggtcactaaaatgcaaattagaaagatttcatcttgccacgtgttcaacttcaattactatattattgaactatctcatctattaaagaaatcataatacttaactaatttttttcagtatgcttagtattaacctggtagctttccatgtttgcatttatgcattccaataatacctggcaaactagatgctttcagcatcccattttccagataataacactgagtacaaaggttaagttgcccagtgctgcagagctgcattgtccagcagtcgctaactcagtttcttcctgagtttgaagtagataaaatctaggaagatctggtgacaagctatgtgatcttacacatgctagacacatttgaaccccagtattctgattagtaaaacaaaataactgtaaaacccatgtcatggagttgctcagagaattaggtgagatgggaacccagtcactaaacctgttctgtgtccacagagggaccacagcacttctgtaagtgggcctgtggttattccattgcgatcattatcaccatcaacacgatccatatccccagcagctctgtgcatggtagttctttaagaagtctgaaaaaacccataattttgttgtaagtttcatatcctcattttttgaaaattccttaaaactgtttttttttcaaactgtgaaaaacttaaaacttcccacagtcttcctctatcaggaaaagaagtctctgcccttcctttgtttctacccttgactactgcctctccaccatccatactgtttaaggaaagaacattcaatgatgcttgcaaggaagaaatgctttctgcagggctgtctccaagtgtataaggaccatagcaacgtgactttacagtgatggagagggactaggctcagacccagatgtcctgggaaggtaggaatttataaccaacggagtgggggagtatccagagtcagaggactctgttgagaccctatcagaattcttgttgaagtcaggccagggaagccagataccacttggggatggtcaactatgaggaacatgatctgaaatgaagagccacacacggaaggtggggattcttgctaagctgactcagtggggttctctgctgaactagtatttcttaaaaaaggaggcaaacagatcctacagaaggaaggatctaactgaagtttcataaaagcaaagaacttttcccccaacccatttgctctttcactcagtaaataatcccttctaaatggactatgatgtgctataatgatgaataccacagaggatttctgcctacatgggcctcccattctagtggaagaagggacaggaagtcagactaaaggaaccaaatatgaattcagctagtaatgcaaacaacaaaagtagggctgtggggtagagagtaagggaagtagacccaagtgaccaggatgggctgtgtgggaatgagacatggtaaagaccctgcagaaagggagaagtccgaggaaaggaagcaggaagtgaaaggctattgagggtcacaacaaagatctggagccagtacagtgaggaaggttaaaaatggtggaaggagtgggggtggaaaggcaggtgggggtcagagcccccagggctctctgggtccctgagggattagatttcattgaattgtggtaggaatcctctgagggggcagcagacctggaggctgtgtgaagtgcttgtcacttctccctattcgttgtaattctcaacagtagctgaaataacagttgcatttctagagcttggacagtgagagtggctctagaaacatgtgagaccaagccagtgtgactacaggacagccctgtgagaaggtctctgcttagctacacttcacacatctgtctaaccatctgtaccaagcctgaaagcgccaagttagagccttgggatttcattggtctgacataaatgagagccgaggggaatggtttccaaagactaaccaaggaatatctgcatttcatcacttgcaaatgagaattttgctcatgaaatatcaactctctgttgaatcagaattatctgggggaatgcatttaaaacatagaagtcctagtactagtctttggtggaagaccagggcacacaccctgatatcaggcagttgagggcatggtgatgcagatgggtatgggtaccaggaccttgactgggttctggatagcttaaatgctgtgggtgaggttgtatgcgtgaagtggaaagcatccctgcaaaggtcaccttggtggaacccttccacaaaggagggccaagattcacagagggtggaggctggaatgacacatgcactgtatgtgaatagtggccttgtaaacagggcccaaagcagagaatacagcccacctgtgggtaacatggagatattccctacttctatcccaatgaagatgtctttctgaattggaaagggacccaataattattgaatgtcatgtggttttagaactcttggctggagccttaagcctctatctctactaacctgtggtcttttttttgtttcatctcaaaagttttgagtggtaactttgactttgggcattttccccattcttttccatagagtctcatctccagtgagctcatttattggtacagaagcccaggaatagagctcaagtcaggtgtagggaagtaatggcccaaagtcaaagggcaaaggctcttttatgccccattaacactcatcctattagggatggaccgtacattattatttaattttattttagatgtttgagtgctactaggagtagcattccatattccctagctcttatgcctcaccttgtggccttggctaatactatctacagtgggagctgatgcccacccccactgcccaaaccctgctcactgggtgctccctaaggtaggcccttgctgttgccttagtccatctggctctggctccaatgtgctccccctgggggactttagagctgatcttccttggcaaagtaccttgaaaacatgttttgttcattctataaatttacctgacttggaaagaggaggaggggaaatgaaagaaaattgaatagcatcctaaacagctcataactgtttctgcagacagcctggaaggctgactggtgctggggaaagaattgatctcttggtttatgaagatgagtccttcagggctttataggaaggtgcattctcttcagttattttacagttcaaagacaaagtgctggcctctggaactccatagctgatttatgagatgttgtgactatgggcataccagaagaatatcaaacagccagaaggagggtttgatgtcatgacagaaagcttgtttcacagtcttattaatgtctagagaagcagttttcaagcctggccagcttgcaccccaggagagagacaagcaagggtcaggctggaaggtccacaagaaagagcagagccacactaaagttctgctttgtcgctgtcagtcacgagtcagctctttctgaagggggtttgctcacaaagccatctgccattgggtagccagtgagaggttttagagagtctcactaactcaggcttggataagaaagcatggaccaggagaggacttgagcccaggtacgtgcaaacagacactcctgaagagtaaggactacagctgagaaggatgggagggagactcagcagggtacacagatgcatatgcaaaaggttgagccttgcagttgcctggtgatgttggactcagcttctttcagccttgatgcacatctgaaaaacgaaaatatgttaccaaatgaggtcccatagccagggaaaggctgggcaaagtctgtcttttctgcatttataaggactcttgtctgttctctgtagcctttgtttaacttgggaaaggcctggtgctaggggctgattgccaaaagaaagaagggaaggaaggaaagaaggaaggaaggggaggaggaagggagggagggagggatgggaaatgaagggagaaggaaggagggagggaggaagaaacaaagagagaaagggtctgcttagatggacctttctttcctaaccccactgttgggggccatgtctggggactttatttcctccttagttattctcaaaaatacatctataattgttaatgaggtgttagtcttcctacaaatatcttatttcagtcagaaaccataacagtgtgagtaaattcatgcttagcaacacctccactagctgcagctgctgatggtgatggtggtggtggtggtggtggtggtggtggtggtggtgatataattataataaagaatgaccccagtacaaggaaaaataaagttgggatgagagagttttcccaccagtgggaacaggacagtttccaagcccctctataagataacaccagcatacaaatgtcagtattggataacctgctgtatggtgattgtctgcttgcgataaagggaagaagtttggcttgggaaggaaaacccccaactttcgggctttcacaaaatgccatggttctccttctggctccgtgggcttgggctagtgactgaactttaccaagtgatggcttccttaattactgagtaataaccctgatgttcagcttgaaggactacaggaaggctaagtgaggctctgagtgcctggaatacaatgaacaggagccagtgttcctgctgttacggcaggagaaagactcaggttcacaaaaccacatttctctaaatgtactcccgggcacagatgctttaatgctggcagccacctctctcttattccttccctctcttttacccgatccctccatcattttaaatacactcctcaacctccaggattaaaaacaatgaacatttacaagtctcagttatttcccaaattctaggaaggagttaaagaacaagggcatcaaaccagattccagaaacacaatctgtatctcttggcctttaactcagtgtttgcagaaagataaactaaaggatgtcaaggcatgccccctttattcctaaaactcaccttagcaataaagtttgcctttggacttaatcgccagaacatgcgtcagtagatccataaaacagttaaagtcggtcaattcaaagtattggatcttgtgttctttctcagcaaaacagagtgtgtgtgtgtgtgtgtgtgtgtgtgtgtgtgtgtgtgtgtgtgtgtgtgtgtgtatagaaataaatgaataaataaaaagaggaagggttttctccaggtgcaggttcccaggtagggtttaggtccctaacctcttaaggatatcttcaaagctcctgttgtctttgtgtttttcaggtactcccctctgggtatcgcctgcttgatttgtgggaagatcatcgccatcaaggacttagaagtggttgctaggcagctggggatgtacatgatcaccgtgatcgtgggcctcatcattcacgggggcatctttctccccttgatttactttgtagtgaccagaaaaaatccattctccttttttgctggcatattccaagcctggatcactgctctgggaactgcttccaggtagaggacaggagaaaatacctttctccacgtttggtgctttttgttccatttgctgcttcctgtttctctcccaaatctctaaatttacaccttttcacaacatatgggaatattttctacaaggtgaacatgttggacctttggcttctcctgcacactgctgaagctcctggttagcttgtgggtggtctgctatcggcctagaaacacaacctcatattaagtgtttagatgttgcatgctatgaattcacatgtccaacattacacgttacatgaagcactaaggtagcataggcataaatattatccagaggatgtagcatgatgttgttcacttaacaactcacctacgatttagaattctttttttcttttcttaaagaaaaaaccttttgaggttttagctaataatttttcaaaagtaagacaacttatgttttaaaagatatgtctatttttgtattgtgtgtgagagggagtgactgcacatgtatgggctctgtgtgcatggctggtgtccccaaaaagccagaagagggagttataagcaagtgtgtactgtgtgatctgggtgctgagaactgaacccacgtcttccgtgtagctgctgagttctcatcaacgccaggagaaccaactttcatggggtaaatggtgattccccaccccaccccaacaattagaaaccggccaattctttgacgttaacaaaccccattaagaacaattctactctaatcctgcccatcctgcccgcctcagatccagtttaaatgacttgaccctgatagacccttcctgcttctttatatattttcagggcctagggaatcaataaggtcctcaaatataggaatcaaaaataatctttaatataatcttgggcaaatattcggcaaaacacaacaaaacggagggaaaagtgcatctggaatcttagaatttcaaagactgaggagttttacccttgcagactgaagtcggtgttttacttctgaatatgtgtcttagtgtcatgaaactgagctgtgagcataaaacactaggcaactcagagcccagcaaatgctgaaacccacagtgggagagcaccaggttcagctgctgagcctgcgactgcttcctgctggtgacatctccactcagtggcacagcatgactggaccttccaaggccctgtgcaggctgtcagagtcttctcagtgatctgaaagccaagtgggaagccaaattgtatttgcatattgcaagcgagtaagaattcaatatgactagaatgtgagctttgggcaaaaggctgaaatgtgttcagtgctggcgaccagatttagtatcctgtttccagaggttaggggaaacacttcaaaatttccctcttacttcctgatgttttaaattctctgtagataaatgcccatatccttgaaaatgcttttctgaagagaagcagttaaccatccccctacaaataaaagccaaacttattttgttatctgatcgtaaatgtgctatgtcacaatagtgacaaggttcagacaatgaatgaaattttgaggaagaccgtgaacctcaccagatgagtatttctctggctaatatcagtaggccttgtagttaatcttcatatttataaatcttccatttcttactgtgctactctagaaacttctatttgttttcctggctcaagagaccatgaaaatcatatccattaatacagatctttgctactactttgtgaacttcattataatatacaggacatgaaagtctggagaaatggcttagcagttaagagcacttgctgctcttgcaaaggacttgagttcggttcccagtacttgaatggcagctcacaaccacctgtacctccaacccacgaagatccaacaccctcttttggcttccatgggtatcaggcatacacatacatacatgtagaccaaacattcaaacatgtaaataaaatgaaataataattatgctgtacatgcccagaggtgtaaatctaaaacatgttggttaaacaggactctcacaaatatctctgccagggtctctgatgatcacctcaggatgcattctagacctggactttctgagtcaagaagtgctcactggctcttttgacgtgcactgccgattaacacttcagcaagtccagaatgtaattttcccaccaactgtgtttgagtgtccttccccatccactcaccagagctgggtattccacatctgtgttgctttgatgcattccaatcttattggtgggaaaactactcagcaaatttgcatgtatttgattacagatgggggaaaacatctttttatttcttactgccttttcctccccattccttgcctcttgagtcatgtgtgagctagctcgattttctttgtgggtactcatcctttcctgggtggttttcaagctcacattatgcatatgaattattaactcttacatcacatgctacagataagaaacctccctcctagacatctgccttggaaataaatactaacttttggcactgaaagtattttatttgtattatattaaaagctgtgaatactttttttttaaatttagaaactcagttctgctcaaatattttttctatccacaattataacataatgctttcatgaatttgtccttaaattatttcaaaaattattattgtttttcttttgaatagccagttatcctggtaattttaaaagacaagacaacttcctctctactcttcctgtggagagaaagagagaaaacatgaacaagtctttccacagcagtgggagctcatgatctttgcttctcatggtgacaatcaaggagcagaggtgggactagaaacagagtcaaggcttaagagccccaaggatggccaaatagccggtatccacttaaactttacatcacaaaggttccaaacagggccgtcataacaatagcaacactgagggtgactgactggctctttgatgaatatggagacaggcatcagagaggagtgtgttccaaatttctggcttcagagcatgctggggggtgtatcatgtcataggaagaatctcaatattggacattattattagcaacatcattgggcctctcagatgggagccaaaaagcaatgccagagtgtcatcctgtcagcacaggaaagccctaatgtgctcaaggactagtctgggccagttgagtctatgtggatttggaggacataaccataaaacccgctcagtagaagaatggggactgtctccatgcttcacaaatcatttctccagtctctgtggccaaagaccctttgatgatattttggaaaagtagacgcaacaagaaaaattaatacattttagtgatccagggagtaagcgttgaacaatatgcttgaggatcccagccaccaacattgactaggtaaccatcttagatcagttgtggtatctaggaaaccctctgaaacagtcccaggaagtggggagaggaattgaggggaacacaaggacaccggtttctaatagaaacagcggaggcagcaagccagaaccacggtatctcctgcatgcaaatgagaacaaatcctcactttttacttgggttaataaggcttttgtaaacaaccccccccccaacccaacacacataccacctattcaattgacttctcctaccataagaccaacagtaggtattacagagccctgactgtaatcacaaaagatgttctttctgtctggtaagttgactccttggtcagtttaagatgtggacttgggtgtctcttattttttagcttccagatttattggtcctgagtaggccttggaatcagcacagttctaagctcatctttttctcccactctgagaaactgagacccttcagaatgtgaccagtcttgttgacaccccatgtataactagtgtgagggagtaactatgaccagggcttgaaaatacctccaaatgctgtctgaactggataaaaataatgaaagcaagacaaactataaagcaaccagtgctgtttggttcctttgcttgatttaaacattctttaaactctaatctcttctgcactattgtctaaaaggatgcaatggtctggacatgaggaagccttgttctcttaggtgtcctattttagatgtaggaacatgtcaaatgttccagcctctaagggcgggccatgtgggtggatcaccatctgatgcctgggacgcctgagagtgaagtcactccacaccacctttagctacagatcacatgatttcctgccctgtcatggcagagacttgggggttggctggtggccatgtgtctgggagtttgactgtatgtcaggctccccagtggactgttcaaagcttgtgttcatgctaaagagtgtccaacatgtttgtccagcattctcccagttagtgagcccaactcaagatgagtcccaggggctggatgcggtccatgcagtcattttgttggaatagcatttctggcatggaactatgggtcattcaaaagttcctcattatgttttgctgttgacagctgacataattttttctcagcccaattcatgtgcacaatcagaagtgcttcaagatttaccctaagatggaaacagggactgaaggacagaggacttggcaggcactgagtagctctgagaatcctgaaccaactaaatattgtgttgcctatcagcagctaaattagaattgttcctagttactgctaattttttttttgctgtgtcattctggttagttctttgtcctgcctctaaaactaactctctctctctctctctctctctctctctctctctctctctctcctcttctctcgcccctagtgctggaactttgcctgttaccttccgttgcttggaagataatctagggattgacaagcgtgtgaccagattcgtcctcccagtcggagcaaccattaacatggatggcacagccctttacgaggctgtggcagccatcttcatagcccaaatgaatggggtcatcttggatggaggtcagattgtgactgtaaggtgagtgacgtgcatgcagaggacacagagacatccggctcccccagtcccactccataccaccctcacttgacagaagctccttgagtttcagctctagtgagaacacagtgaaggaattactgacagacttcaaagggaggaggttgtagcaggaaggaaagggagtctgtcccatctgtatgtattgcacatgcccactggcgcccagatcccgtttgactgttaacagtcctataaatttggccgtacagttatttctatgcttatccaacacacaaggttggaagtattgtggtttatccaaggctactcatgagctggcatggcatggctgtagctgtggtgacttttacttattctgggcccaattagtctgttattaaaatattgtaggtgagagagttcagtggatgaaaggtgcttgccaccagacgttaaccctgaggccctacataatggaaaaagacaactacctcttaagttgtcctctggtccctatacatgtactgtataaacacctagacatgccaaattaatatttaaaacatgctgctttcactattccaaggtacatggtgaactacaaagattcctcagtacagcatagattagttgagtgaatacttttttgtaaataagtggtacacggctctgctttcactgaagcttttatttactctctggctttatttttttttttaattgagaacattgtccggagagctcatctaaaacgagctgtttcaccacagactcagatcttatttgtagtcattgaacgcttcagtctccaaaccgctcagtgttgcactgacactgtaccataaggtcattttagtatcgccatatctactccaattaggagcttctggtaaatcagaagacagtttctgcctctaattaaagtagaagaaaaacaaagcaaaacaaacaaacaaacaaacaaaacagttaactacctcctggtcccacttacatctcacccccactcccagagtatcaaagtcctcatctacaaatgaggaaggtctttagcactggggactgtgaagtggcagttggtggggctgaagcaagccagagccttactgtttgctctgtaatatgctgtaaaatcattagaacgttaatgtcttctaagacaggtgttctccatttactgactacccctgctccttatcacccagacttagcctggtcacctactatcaactgcctgtcgctttaaaacataaagttatagctttgggatgctgtgaactacgtttcctttctctctcacattctatgagatcagtaaatacaaaggataggtggatcacagtctgtgtaatcaatgtacttgctggcaaaagaaaattccaaagaactataataatcccggccccactgatttactcagagaacagattaggttgacagggaaataactttcagtttctcaaatgagaacagttccagtcctctggcgcccctgagctggcattcttcatggctcccttcagacattcccagcagtctgaaaaggaaggatggccattgtcctcatttcaaggaacactaatacaagcctacgggtgtttgtgtgcaagacctagttttcagggttgtcgatgccatagaccggagtcacatgatgattccttaggcaacatctttccattttgtactctttccttcctgactttaactcaacggaagctcttagaataacagctttattggtcttatctgcattgtacatgaggaagaggccatgtgtccagattcatatagaggccttttcctcccatcaaaccctgaacagcacggtcctcctctgctttagacattctgctgacagccggtgtgtgtctgtctggcccacaactgatgtaccagttcattctcagggaggtctttagtgatcttagggtcaccttaggtgctgctcataagagatgccgttcatttctttctgatttctctacatgttgaggttattggcactgggaactgaaattctcagtgttttatgagttaataccctagagcatctgccctgtcagagctgtgcctcctttatctatctgggagccttttagccagcttggagctatttttgctgggttaccagttccttcctgatagccattccagaagatttttaatgagcattccatacacatcagagcttggccgtacaactaagtaagaaaacaaagaaaatgaaacctcgccagatttaacacatgatctggaaatacaaataatgccctgtgaagccacctcacctggcaaatgaggacaccaagactcagagagtccagccatttagaagctggctaaaattcaggtccccgaattctgatatattcttctgcttactgaggatcttaatgtgtggcctttggggtgtctttagaaaaatgggtactgtgttctgtctatcttagctggtgataaaaaaataaaaccataaaggaagaaaaagcttgcccaagatcatgtctattagtggtgcagtaggattcaaacccaggctacctaaatgtgggccacactgcctctggtataatgcgattgggctgcctttgtatgttgattgatctgaccttcacaaacacctcgtattgtatatgctagagtagaacctccatctcctcatgtgtaccatggcaacagcaatcacagaattggggtggttaggagcatcatacatgacacatatcacatatcagtagatgggagctattggaattgttcctacccagtgacgttcagtaaaatataaccgtggtcctgtaatacgaaatgagaaagcagctgtgacacagggagtgccacaagttactcaggatggaaaacttgcttcagattccagtatgaagcatgaatcttgtccaaacacatatcacatgagacttccaacttcccactcatcaaaactcttgacttaatgaagctgttggcaaagtaatgatagctttatgtcctttcattcttggccctgacagcaatcaggcttaccctccagtgcacaatgggattagaatcagagcagtgactgcaagaccggtatttcactgatattacagaattccatttacttgtaatttatttcatattaacaatgctactgttgtgaaatttcatgagcaaaggataaggttgactacatatgtttaagtctttgcttctgaataaacttagccaaaatctccttaatttttagaaatatgaaagtttggcttacataggcacctgcatggcatatgcacagttctctgcctgcaatgtatttggggaaaaatagccaagtctagctttatgctgtgctattgtgtgaatcctaattctctcttctccctcatgtaggagtacaatgaccaagaactttctgtatatttattaagttatagagcttccagggtcatcaagagccagcatgtagcagaagcaaacagaggggtgttcaaatcccagaagaccacattgaatttgtgtgaccctaagttacctgatccatggaatcgctggttgtctcatggtgaaagaagctgtttatgtgccttgcgtggttactgtgaggttctgctttgatgttgtgtacacagagcttggcacaacctccagcaaccagcctcgagagaagccagccaggggagtggactcccagacaaagcagaatgggtcaagggaccaggagaaggctgagaattttctagataatactgtccataagggggggggggttactaatatttgactcctaacaagatttttcacagtgcttgtaagagtgactcatgaccagagcaacccagattgtaaacaaaacagccaaggctaaggatgactggaacctgggaatccccacttcctttctgtcctgtcaatactggggacgggctgaagagtctttgctgtctgggactttagggaagtttcactcccacagctgtctcaccttgtcctcaagtgcccgataagaatgatagattacttggcttgagggttgtaatgtgccctacctctcttaagtgcccatgtacttattggttcctaaatgccgccggccactacatgaaagagaaaccctcatttatcctttcaaccggtgaggaagtcaggatacagttgcccaaattttgtatgttgttgacaagtggtagagctaggatttgaatttagattgtttaagttcaaaaagctgctacacactgtatctgctgtctcatatggagttctatgaaatataccagctccatactggtgtgacaggcacagacatgatcactggtgtgacaggaaagggcacagacatgttctgtattgtatgtatgtagacatgcaataaacccgaaaggggtagcaaaatacaccaaacatcccagtcccttggagctccagggacctccaaattgttctcagttacaagtcttgggattctaggctgggccacactgatggcctgacttggccaaaccctcccatgagcctggagtgcttgctctagaaatattttaatgttttaactacaaagcaggcaaccctcattgtttcagcacatacaaagtcacatgagagacctattttcagaagactgttctattcagaagcgacagctctggatatcaggatatggcttacttgtcaatcacaagctagattccaaaacccacataaaaatactaggtatggaaacaagtgtgtttagtgctaacatggagagtgaagaaacaggcagatgcctagcagacagctgccagctggtgagctctaacccaatgagaaattctgcctcaaagagggtggattgtatctaaaggtagcatcagagattgtcctctgacctctacagcatatatactcatatgttcatgtgcaccccaacatacatactcacaaacagttaacaaataaaaagaagaaatgattgcttctgtaaaataacctacgaagatgagaaaagtcactgccagttggtgatcctcagaaaccctttggtatgtagacaggacacctgaacccaagattaaactttaaactctggggaaagagttcaaaatggtcccaggtatgctcctaatattgcttgaaaagttgatgaaaagaaaagttgagaaatttttctttattccattaccattttatggcaccctctttctgaataatgcattttccagccttgggagaaatggccaggcaagtgaaaccgaatgtatcttggaatatgttgtttgcctcccctggtgagttggttctggatattttctattccaagttcccatgctaagcattggcaatgacctactcagactccggccacatagtctgaagaactgtgtggtacccacagactcatggaggcataaccagaattgaatgcagttgtgttcccataggaggggtgaggttgatttatttcttcatttttaatacttccgtatctgcttttagaactttacctgctttagtcctgtgtacattagactaactaggtatcatgccaaggatatgactccaatctgtgaatttataagtgcccctcattgttgaactcagttcctgggtattagtatttcatatttcttcattccctggagaaaaaaaggaagggatttttaatgtctggaggaaaattggaaggtgttgttgttgctgctgttttttaaaatatctctaagattgccaagactctttctcttcctgtaacctgggcttctctgtctttgcagccttacagccaccctggcgagcattggtgcagccagtattcccagcgccgggctggtcaccatgctcctcattctcacagctgtgggcctgccaacggaggatatcagtctgctggtggcggtggactggctgctgtaagtgcccgtgggttgggttcttctagggattgtgagtagggatccccaatattggggattccggggtgtacagttgacaagattgcaataagacagccaattctccacgttcccctcctctcccttctacaaaggttactatgtctacccaggaaagaactcaaaagtaatttgaggaccttgtaggctagtggaggaatcagacaaatcacaatacaacaataaaatgcagcaaagagaaggggcttgggatacagctcagttggtagagtgtttgcatagcactgtgtaaaccaggcagcatgattcacgtgtgtattcccagcactggggaggtgtagtgaagaatcaagatcatccttggcctcacagtgagttctgaggctaccctgggctatgtgaggccctgtctcaaaaaaaaaaaaaaagtagctgtaatgatccaactaatggtacatgcaaagaatctcaaaacatcctcctgagtgaatggagccaggcacaaaagaatgtgaatgtaagtaactgtgtctgcatgaagctctaggggaaaacactatagccacagcagtagaaagtgatcaggggtgcctggcatcgtggtacaaggaacactgaagaatggtggaaatgtcccacattcacaagtgtttatatttgttaaaacttgttacactgtgtttaaataaatgggcacattttaacatccataaatttcaattaagtaaagtgtattttaaggcaacatacagttaggagcacagggatggagagagttatctatgctagtctaagatggaagggtaaacagactatcagaaaacagtaaaagtggttgctgaattagagtgcacagtgtgtgaccgctcctataacaagctatactagtctgaaagtctgaaaatccccgtatcgtaggtcaggacattgagctttgactcaggaatgggcagagatttgaccctaggtcaacttggttctggattccatcacattcttgttcatggtcagattcaactttcagaagggaacaagaactgtgctcagacataagtgatgagaagcccagagccactgaggtggaagagaaacagtgcttccctgtcaagccagctgtgccaaggccctgggacagcaaacactgtggtgtctcttaagtaaaggaaggtgaggttagatggacaatacctttggaggccatgtcagggagcttgaatctgactgcatgcatttagtctgactgcatttcccagtgaagaacattttgtagtgtagaagattcatagcccgttcacaactgtgggaaagcctgcccagatcatccccaagcaacgagactaaaatagagctcctctaagggcccctgtgaggacactgctgtgccttgagactcgtgccaatgggtcatgcccactcttggagttaagtgacagagtgctggacagtgtcatggatcttaacatcagaggtacactgtgacaagtgtggacagagatagaatctctgtccacaatgcctgcacttcctttacaaagagccagtgttttgattagcataaattctaggaggaagaagccacattttatggatttatagttttaactcctccatacccctactcttccaaaaaaaaaatgcaactgaagggacataggacatgaggaatggctagaaggaagcctggcctctttatcttctgtgcctggtgttggtgcacgcagtggggaccaggtttggagcaaaaagaggctctgtggacaccatgtgttcaatcccccagggcatctggaaagctagggcacttcctggcttccttgttcatcatctgagctgtgttgtggagatgacttgattgatcatgttgtctctgccagcctctcacatcctggtggaaggtccttctctgataacttgcggttttgttttgttttgctttgtttttctgtgccctgagttggtaccaaaagaccatgccatctgctcagatgaggcagctatgagttagtggtgcaggtgggaaggacaaggagggagcaaaataaagaaaacaaaggtgtggctaaagatgaatgtgaaaagggatcaaggagaaagaaaagcatcaccagtgtctagggacaaaggatgtagagccagtctgctgaccgaccttaacctcagaagaaaggtgacaaaggaagttgtttaagttcacccccttcccctattacttgttgcttccattctctcccagttctgtgtctcttaaacctcctcaggtcctgctgtaaatctactgcctcatctcttcttggacttgtttctgaagcttgcaatccaccattagacctcatcttttcagggctgggtgggggcggggcgggaggatagctcacttagtaattgccttgcaagcctaaggacctgagttcagtctccaaaaaatagcaggagtgggccagcaagagggcttagtgagagaacccccttcacaaggttgtcctctgacttcagcatatgtgtggtggcacccacattcacacagactacacccacacacacacctgcacacacaggaacatatacacttgtgcttgtatgtgtgcacacaaatgcacacatgagaaatttaatctattaaatgtgcactggtgtagcattcctctcattataatcccagcatttctgagtggcaagaatgcagtcacttgatccagaactagggaaagacatggatatttggtaggcactgcagcatcttagcgtctgcttttcatttacccctgaagagctctgtggtatgtgggttagatgaggaaactgttaatcagaaaagtcagtatcttgcatggcgtggtggtgcccacctttaattccagcacttgggaggcagaggcaggtaatctctgtgagttcaaggtcagcctggtctacagatggaggtccaggatagccagggctacatagagaaactctatctcaataaaacaaacaaacaaacaaacaaagcaaccaaaccaaacaaaaagaatagcccgtgtgttgctttcattttaacagaattaacagaggtaggactttaagaactgcttgctccaggaagagtggtgctagtgccgtcacacctaccccctttcctcttgctttgtcctgttaccttctgccctatgatggcacagattggccaccccaggttctggtgcttttcacctatgacttctcagcctctataaatctaagacaatcaatttctgttctttatacattccagtctcgagtattttgttacagtacctcaaatggacaaagacatccctgattctatgtaataataaccagagacccttttatttgtgcttagtttatttttttttcctctaagattaaaatataaccagtaacctaaatagggaacaatgaagtaggatcaaagccttagggactcttaaaattcaagttctctagccccagcaagtctgccactgcagccctggatttcttggcagtctcctgctctcaagcctgttggaagaggattgcttcatgaaatattgaagaccttgcctacatctgacctaaatgttagcaaatgaaaaaggagggttgagtcctctcagatcacaccatgcagatgctcgcctgctcacagttgtgtagagaatggtgtcctttaagtctgtagtgtgccagcaggaaggagcagggtgagcaccactgatcactcccccccaccccaatgatccatcagaattaatttccctaacaaaaccacacaaggaaacaaaccaaaacaacaaaaacaaacaaacaaacaaccagtcctgagctggaatgggaaagaagaggaccaatgaaaagctttttctaattctaagacttagaggggctgaggccatgtgatcaagaagggaaggagggctgggtgttggtggcgcactcctttaatcccagcactcaggaggcagaggcaggcagatttctgagtttgagcccagcctggtctacagagtgagttccaggacagagaaaccctgtttcgaaaacaaccaaaaaaaaaaaaaaaaaaaaaaaagaagggaggaagcatgggggatcttgggtagatggacatcgggtgtggattaggtctgctttgaatcagtaccgatcccaccttcttccataccagtgagagttctagaaacaagcgcttgagcttgctaaactccatggctttgatgtccactggtgtgtaagtgggaatggggctaggttgagatatgagtgaaagacaaggctggctgttcttcagaaaagtagttgatgacagaagagtagaaagaaagagagtagggtaagttttttcctctttaggcaaagtctgtaagcttttcataacactagcaatttttccatttaaaaccaaacagaggccacagtgacatttagtgtgtcacaatgtttgccaactgctagagtctagtcttattacagcccactcagccctagattccttgtctgtaaatgtcatggtgaaaaacctagattctagagcatttcacatgcccaagtcctgaagtatgggaaaggcagccatggttaatacttagcccggctcctgaaaccctttgtatcaaaactcagatctttataagaaactgtaggaagataatgaggggagtccaaaggaaaactgaaataaaactgatgccagagacagataatgaatccctgggcccatcaagatccaaaaaggaaaagccacacacagtgatagcatcgtggatgtgtggtccacttctcatatgacactcttagggagatctttcctggactcgtgtttgccaagtaagggtaggtataactgtgttagtgctcctctctggagggagcacagctctgatcctcaaactgagtctgcagtcattctgatgtggacccaggaggtctacagaacagacatttgtaccaggttcccaggtggtgctggtggtagagtccaggaatcttaattctgggagactgagctggatggagtatggaaggagtgtctggtcagcccgaatctggtgatctaagcatctgtattgagtgactattgccagtttatacagccattcaatgaaattgcattgtaagggagttgagtgctagatattattctgatcacttagcactgattcatttaaaagttacagcaaattataagaaatctaatagtacatgccctatgtagttgtaacggagaggtgtgatttatcatttttaataactattaaatgagcaatatataattcaaatagtaacaacttggatatttcttaagtattgtaggagtgagaagataggttctctgatccttatttaatccatgtgcaaatgtcttaaatacacccacataaatacatgtgctcacgcatactcgcacaccacaccactgccgcctccacactacatccaaaacttacttagcttccactctattcctgatggaaaaggaaaccaactcccacatccactgtctctctgaagactctagaagctttgtgtttatgtcattctttggattttattcttaatgcatacagatttctcctttttatcttatctccgatgtatatcagtcactgtggaatgcgatccacacttcaccaagccttccccttccaacccgtgggcctctggcccaaggcaaggcaatcatagatccagagggtaggtggatgcctcagtctgaccagcaacgctatctttaatctgtcacaaaaagctaaagggagtcagagaatgaaatggaaagtctcttacctgcagttgagtcttagtgttctctgaaccctaaatttatagttaggatatatcagcatagaaatttttttttaaaaagcacttttgttttatttttatttatgtccatgggtctctgtgtagggatgtgcatgtgagtgtggtttcctggtccagaagagggttttagttgtgagctacctcctgtggatgctgagaatcaaactcaggtcctttgcaaagaacaatacaggcctgtaactgcggagcctgccccagcaatggaaactgtaatcctggggatctcttcctctaaaactcaactttgtaatgtttgaagatcacctcttaaaaccttccctccctcaacttgaccatttcgagtctttttgtcttgccaagtcctcttgctcttcttgttgagtctcttcccagatcttggttcacctctttcagtctggattctatgactctctcctcttggagatgatgcttgcatctttgcttttcactgtgcaaagcctgccatatgttttgctaaacaaacaaccctttctttctctttagtttatctgcttctaatccaaatgaaggatccattctgttcttgctcctgctcctatctatctcccaagtcttccagcctgctccaggctgcaccgaatgctcacaactctctctggtttctgtgttctcagacttaaccaagtgtgatagaaaccatcttttaataatgcatctgatccattcatgtacagatacttttgtcttatgagtctacccaaaacaatacagcacaggtgcttacatagtgtccccactgtaatggggactgagagtgatctagaggcgatttaagagatgcctgaagggtagaagcaaatgttaggacatttggtgcatggggcttgagcatctgtggctttggatatctgtgggaggtcctgaagccaatcttccatagaaactataaaacatgatttctgtattcaaagagcatgcacaggagtaaagaactttcaaaacaacaaccagatgttgtgtgctcaagaaatcccagcagtgctagttgaaaagtgaggagtgtgcatctggtgagggaaatgaagaagtgaactccccacttggctaataatagcaatcccttgagcagttaaagaaatggagcttgttttgtgcctcaccagcctttcatatgcaaagggttttgtgtggagcctctgggcagttattatcttcccctcaggtgagtgttgttctgattctgacaaatgagaactctgcgtaggaagagctaactaacctgcctgttaaagccatgagcgtatcccaggctggaatccaatctcatcataaccaacagtcaggtgattttagcactccaatgccagccgtccccagggtaggaaccctaggtgaccagttgctgccacacagggctcgtaaagagagtacctcactctggcaccctgtcctctgagaatgtgcattatgctttgactctacttggttaagttctgacactcggagcatttggttcttttacatctgcaacaatgatcatcattaggatttagcacatgacaaagacccagatgaactgtgagtgacccagactttctgtgagaactcagacctacagacagtctctcacctccctgccagaggactcagaccaagagaagaaaagagccagactaccttggcagttcgttcttcaaggaagccagacccagtgactggtgtgaagggttgttcagctccctcttggttttggttcctgccagcccagaaagaagagctgagccatttatagtggattcattagatgcaagcttctgcttccaactccttgactttcctgccatcctggcagacagaatcccagaggcagcatcaacaaatctattcctttttctttttatcatttcttctttcactctctttccttccttctcttctcctcctctttttcttccttttcgtctcaatctcccccacccctgcaaccccctgtttctctctctactactgaggtcatcatgaaagttagactttccccagagatctggagtaacaatgatagaaagtgaaagttatttgcttatggaaaagtttccacatatgaaatagaaattctcatattcttcttggggtcaaagttgtactttcctcgagccagtaagacgtttccctggtagtttagaagtttcttgtctttgcagtattttcggggggggggatataactagaatatccatgattgatcttctgactggacaacttgggaattttcccaggatgcataatgacagaggagggtggcaggatggggcttgatctcagttggattcttgctgtttgacatacatgtcatcttttgatgtatgccaactcctgaggaaccctcttccataaactttccctctgccccttctcttctatagtgataaaattgagtcccctgccaaattatgactgtcactgcacttcagatgccatcctctcaaatctgtccaggaggcattgccagagatcatcattgtttctctgaccctttagtcctgtcttttcaatgggcttcctttcatatttagtcaccgtcacaaatttcaaaataaacacagcacagaaatccctttccatattctctgcctctgtcgtcagctgttctttcctttcctttcctttcctttcctttcctttcctttcctttcctttcctttcctttcctttcctttccttcttggaagaggtgatttatatagacatccatagtgtttctatgactcctcacaactgttacccaacttgcaagagccaggttctgtccttacaaactgctctctgtggatcaacaacagtctctttgttactaaaacttacgcatacttctatttttttctaaggactcaaggggataattggtattgtctgccacactctgcctattatagcagttggagtgaaaatagggttaatgttttcagagggagacagtagctgaactagtcatgtttggatgtgttgcctagaaactgccaaaatacatttgaattggctggataaaacttatagtaatactatatgtacctcataatcagtgtaaatagctttcttaagtgggttttagcaagtgcttgaaactgtggtaagcattttgtttatattgttttcctgccataacaaccctgtgcgctggccatgtttgttgtttcatttttgagaaggtcccttgtctgctcagaccttctagcaggtaagggacaaaactcaaacttgcatctgagccaggcagcctcgggagtccatcccttgactctttcccactgtggtgctatgggtaaaacccgagtccttgcacatactagataactcctttttctctgagctacatcccaaccatttatttctgctgatatacataaaattatgtgtataattttatgttttaaaacacaaaactcacaattatatatattagaggtaccccataatatcttgatgcgtgtgtagtgctttaattgtgttaaatatgtatgtcttctcaggagcaatttctatacgatgaaaactccccacattcttcttttatctttgaggtgtacagaacatttctggtgtccttgtgaccgtgatgtgcactagcaccctgggctttcttactcccatctgagtgtgtaacaccttgtcttaatgcctgccctttttgtacacttatgctgggggtggggtggggggttcttaaccatcagctccaagtgatatagatgtcctcaggcctaattcttcattcaggtgaagactccaccacccctcacctcagccannnnnnnnnnnnnnnnnnnnatcccaaccatttatttctgctgatatacataaaattatgtgtataattttatgttttaaaacacaaaactcacaattatatatattagaggtaccccataatatcttgatgcgtgtgtagtgctttaattgtgttaaatatgtatgtcttctcaggagcaatttctatacgatgaaaactccccacattcttcttttatctttgaggtgtacagaacatttctggtgtccttgtgaccgtgatgtgcactagcaccctgggctttcttactcccatctgagtgtgtaacaccttgtcttaatgcctgccctttttgtacacttatgctgggggtggggtggggggattaaacatgcaaacgacattctcgatcaatgcaaaaaaagtagatgaataagaaaagagtaggtggggtgagcggctccgtgtcccgcggccgaggagtaaaccattttggcctggtttcagggggaatggcccttgttgcccccgcgctcacttctccgccgcctcgggaccgcaggcgaaaaatagcacgcgggttgccccaccctgcacccgcggcgggtcggggctggcttgtcccagctgaccccgccgcgaagccctccgagctatgcgcagctcgtccctcgtgcctcggcggccgctggcccgcgcggcccctgcggagaagccccacacttccctactgcgactactccgcagcgacgctcttgcctctctcccgtctcggtaacctttggtatgtgctcagtcaatcaccggatacggcgtttgctcgggcacacaccagcccccgccctataggcttgcaagtccgggcgggtgctcagcacacacgccgcgcccagagccccgccgagcagccacgcggccgtacgccgacgcctatcgctcactcgggcggcccgagatccgacgcccgagtagcatgctaccgcgtttgcgtacgttaattgtatccgccgtgctggctactctcatatgcatgcgtaccacgtaaccccggccccgctcaatgcataccacccaacgtcctccgtgcctcccgaccgcccgacagacggcacccctatcagcgnnnnnnnnnnnnnnnnnnnnctcccgtgggggtgggggggttcttaaccatcagctccaagtgatatagatgtcctcaggcctaattcttcattcaggtgaagactccaccacccctcacctcagccagattctcgagtgcagaagagggactcagtgcattcaaaggcagaggcacacccaagagttcaagttcagctctgatcacttgacacccaccccaccaccagcaccatgggcatacttgcctggttgaaatcaggacctctggacttataagggagccacaccaagctcctcctagtgcagcttcattattcccacttcctaatgacaggtagatttcatcacaacaactaggctttattttaggtcattgtcttaattttaaaatcaacatttccactctgtgacttaatcttagtcatagaatttgaatgaaaggggagtgtcctcactaatgctctcctagtaatagcattaccccatctcctgtctcttctctgcacatttacttacttgtttactgacttacctctctagtggctttccagctcatttatgggtagaactttggaggtgtaggaaatgtcatcagaggctccttcaacaaaccagcttatgctccccaatgggaaagcgcagctacctttaagaatgtagtgagctttcctggtgatgattttctaagatgagtttttgttttgttttgttttgttttgtattgtattttattaacaaccactttttttttccaatacagaatttgtaacctaagtcacgaggaggagggaaaatactctggatacttgctggttctagcagcactctgaaatattcttcttaggttcatagaaagggcaatttctaacgcaacctttgtttttcatctttagggatagaatgagaacttcagtcaatgtggtgggcgattcttttggggctgggattgtctatcacctttccaagtctgagctggacaccattgactcccaacaccgaatgcaggaagacatcgaaatgaccaagacgcagtccatttacgacgacaagaaccacagggaaagcaactctaatcagtgtgtctatgccgcacacaactctgtcgtaatagatgagtgcaaggtacctttcccattcctggatatcgagacctgcatatgaatagtgcatgctggactccttaaaaaaaaatcacaaccccttgcatccattcttaccatgctttgtaaggaatcatgtcacccaagctcctgtggggcccagaccatctcactctgcatccagcatggtgggacatcagcaagtctgacaccaaaaggaccaatcagttgcttacttcaacagattcccacatccacctcacccctctaatttggtcaatattcttcactctttgggccaagaattggtggttgtcagaactttaatggccttcagatattctcttcctcaaaggaagggtcagaaaaatgtagaccaaatattattgactttatatagcatgagtattcctccctactctgtattacaaattgcttttttaaaagctcatataaaagtttaattggctgtcttccttttattttttatttttaaattataattatttatttttttcttaggaggataagttgtagttcagcttttattttgcatcccaaatgggtatgcagtttcaagaataattgtcctccaaaacagttatccagaaagttttttttttttttttttttttttaatgctaagtatcacacactccagttctcctgcagtgtgggtgttctgggttttccttcaagctgttgggtgccaagtcttcaaggttgatcggctctagctggccttcactgtaactaacttgacattgacaaagacagtgtcatgaccagagtgatgcaaacttggagaaaccctggcagatgggagaagggttagcttgctaaatgactgagtgtattagctgaggccagtttgaatctgtagcaatcccgtctacctttttttatggctgaggatacaatcacatttaatctttcttccttaagtcttgagtccaagtagcaccgttgtttctgccagagagttacagctaactgtcccatcttcttgactgtataccataggtccagagtactaatggaccagagagtcttgcttgcgctcactatatcaagtacatgtgcaggagagccagagcttggctacaaactggggcattagactatttttaattaattaattggcaagacaaaaatgatttccttttaaaaaatttcagatatgcgtttggggctattgtccatcttctagaaacattactgcttttcacattcaagtaaatgggttaagttcctttccacagaaatgttagtttggattaataagggtcaccattctcatggaatgacttttatcttatatttatcaagtatttattgtgtgccttgtatgatttactggtgtgtcctcacccttccccgtggcatccgtgttttgatcattctccaggtatttagtgcttatagctatagaaccctgacttatatactggagttatacaaacaagaatatgcagcataatacaagaaagaaggtcctacctcagatcgttgtcatgtaaggaagcataggatgtgacaaagtagagtcaccataattattttttttgttgtttcacagttatgtgtaaaaagaatcctaatcaatgctgggagcttcttggggcagggggagcttctcaaatggcttcttaagactttggagagagtttttaaaaagtacagtatagagggaaggagatggttttggacttcagacttactacttttcatttcttaaggattgcaagagtatttactatgtgtttaaagcaaaattttgcaagctatagatggagaaatgtaggctctgtcagtataaatcaagccagtcaacagtgctcttggtcttggctcatcatcatgtccaactcctcaaacagtgtctaggctgttgtaggcactcaataaatatttgttgaataaaacccactagcattgtgattccatgccgtgcttatatagccttcttttgattggactatagagctagtagttcagtttctccatacaactgactacccaatcaacctcctgcatccttgtagagtaattagcacttagatggtcaatattcaatctgagcatgctgttaggataacggatctgggtatactggttctataaatatcttagaggtttgtgttgttagttaggtgattgcctttagctctttgaaggggaccctagccccaggcttctcactcttgagtcagctacctgtgtggtcactgatgtagaaggcagggagagctatgtgcttaaatgacccttttcctaagtatctggctcacatgtgttcatttctttggacttctttctagttaactctcaccaccaccactttttcggtccagtttttagagcccagcaagaagagcatcaatgctccttgccaaggccctacccttgactgaacaagacagggatagaatgggttagaaggtggcttccagcttttttggttcagcaaaggttcaactacctttgaaatataggtcccaatatttacaaacaaaaagcaaacatctcccacatgctgtctggttcttccaggataccacattatgattgatagctgtgcactgccattgatgagattaatcattaagagccaaataggcacattcaaggccacaaggaataggcagatttctccagtccgtccctggtagtttttcttgacattttattgaaggggaaaccagtttgctgcagctctggtcaaaactactttcaagcattgttatgtcatgctggtgtcttcataaccgtagtttggagttttgcaatagccttttaattctcctttaagtaacagcatgtgagccatcactgctaattgcatggactttctaagtgtttgggcagggtggggagcatgtactaatgtgaattggatgaatgaatagtgtttttattttcattgcatggttcgtgaagggcacctggttctctgttcccagcatgctgcatgctcttgatgcatgcatttcattcccacttgggtaaaaaggaggtccgatttctttcaaactttgctgcatttgtcatgtctccatatcctaatgcttccataaatccagtctcttcattatgtggaatatcagtcgtgggtttaagtttgcacatgaccttgaggacagacagacagaaggtaagctaggaaacctgcttagaagtggatgggagaacttccctcctgcataaaggttcagtttgctctgggccagagaaacagaatgtaattataggttcccaaatatctacatcaaaatgatgtggaatgcattgctactgatccctccacttccaaacatttcccgttttaatttctaaagccaagaagacttattcagtaaagccaaaacatcataaagtcagtaatcaagactgaacatgtatgaaattcccctagcctcactgtgactgaaccttttacatgcatgagtagaagtagctgcctaattctggattgctttctgtatggttgtatggagtagcacatggcactcactgtattttaaggactacagtggtatgtgatgggtctttgggtagtgatatattctacaatcctaaaaatgttgttgaagatgtccctaaactgctgagaatccgtgatctttcaggcaaatatggataattcaactctccattcagtaatgaaaatcaagatgggttcaaaactaattttgaaggaataccatttaaaactatggtttccccatacactgtaagcttggatctggtgcttctccacatgacccatgggaggtgtttcttgtggttcgtggcctgtaagttggatgttgatggtaattgttttcaggtaactctggcggccaatggaaagtcagctgactgcagtgttgaggaagaaccttggaaacgtgaaaaataatgacccgattctcagccaattcttgaataaactccccagcgtatcttatggtaaaagatgctctctaaacaggcttcctttacaaaaggaaaagatgcatatgtttctatgtttacttaatctgttagctgaggcatagaggagctgtgtacacccgtgatgataggcaccgtgctgtgtctttgccaaataatgctttataactgtctaattttcttacttgtgttattgtttgaatggacgctgctggagaaactactttgaatggaagacgtgttcttgccagcttccttttgtctcagtgcaacactgtggatgctattttttttccaaggggacaggatgaaagcagtgtggtaccctccagggacttaagacaacgagcacacatgtgctgtcttccttaaagtgttcatggctcaccttgttctacacaaaagattctgcttgaagcttctagaattacctcccctccagcctgtagagagttggcacctacattgattgaaagcatctgcctgggggaactctgacaacttacctttttgtgcactgtctaagtagaatgtttcagagtttcatgggtgcccatactctgaaatgcaggtgaccataaaggccacagctctgcctttctgtgtgtgtgtgtgtgtgtgtgtgtgtgtgtgtgtgtgtgtgtgtgagagagagagagagagagagagagagagagagagagagagagatgtgtgtgtgtgaaaaatgtgaaatttcaaatttgaaaatgatctaggaatcatttgcatattaccactgtataccttgaggaaagtgaaggagcatagtcaacttgaattttagtcagaattaaatattccaattctcttgtttgacttgcattcgtagagcatattgaactcaagtgtgatgatctgatctggttttttgttccacccatagattctcacttgagttcctcaccgaaagatatttctaacacccaagtcacttccatcacatccttgtctgcttatatggctgagcacttcagcttcctcacattaagagacacacgttggctatgactcttttcctatcatcctggtatatatctaatatgtagaaagtgtttgttatattaaagcacatgaaaaatatcacaaaacacaaaagttctttggtgagaagggaacagaaaccacacatgtatataaaatcctataaaggttcctatgacagaggccaggcagcctcaaaccatcagatggggaccaagaacggctctacacaactttccagatagaatcctttccggggactgtgaaagtctgaaggaataaataatataattggcacagcatgagggtttgcctgtggtaggcagccaacgaatccttaatgatgggttgtgcaagctaaaattgtggatgtctctattattatcttctgttgaagaatgcacagtattttcctaagatcctgggtttaacggttagcggggaactggaaccactgaaaaacaaaacaaattcaacttgaaggagtgtcggaacccaagccatcagtcagggcatgtgtgtcctctgaagcaggcagagctgaggagacgttcataagcagtaataggacccattgcctctgaagaagggcacggggccatcgtttctcctcttagcccctcttgtgacttctctccttcaaatcagacagctcagacacatacaaaagacaagagattcctgttgctttatctcatgaaccctaactgtttttaaacaaggatcactattgagcagtattaaatgaattagtttgttctgtttcaggttttgacttttgaaacaaggtctttttatgtagcccagaatggcttcaaactctcacacctactgctcagcctcggttctaagatcacaggtgggcaccactgcatcggctggcagaactcttgtttatacttttctgagagacagtgaacagggtagcagtgaccagctgtgaaaccctgaaggaagacaagaagggccaaagggattctgctcagctgtggaactattctagatagcctgtaagtggtaccccagggctctcctatgctgagtagatgtatctaggcaaggcatcaggagcatgctgggttttgctgtgttggggagggaaaggccattccatacaatgagtctccccatacaagaagaaacaaggccacgtgggtacttgaacattgctcttttcttaaaagcactcacaggatgacagtgtttgtcatctcagattctgcctgaaaatctttctaatttgttttatcttcaccaccccccccccagcagtcctgttagcttatgtaaagaagacagagctttcaggagaacaaaggcacattatttctcaagtcaggttttgctgactacatatgctgtctcaagagaatatgctagggaaatcacatttactgaaaatttaataatttttatttaaaataaataatttatcaaattggagacttccctaagaaatctagaatgtgatggaattgacatagtactgtgtcttgcttttgtaagccttgttaaccctttccatgcccattggagattcccttgcctagaaaaggtgcaggaagctgaagaaaaaaaaaaacagatacagagtgtgttctagtagccttagtctaaatagggtacctgtcaccgtgtgtgtattaatagagccatcgtagatctgaatgtccataatgatgattaatcttttatgtgtagttctctctctgcctctgtctctgtctctccctttcatatgcacacacacacacacacacacacacacacacacacacagaacatgtgtgtcacatacactaactccaggaaccagggaggtttgtgtattggggctttggcagtgctattcctgtaacggattcagttaatacttacaaagaatcaaaatcatttcagaaaaaacaaacaagtgagcagacgttcatcttccctgtctcgtcctttccctataagaagtaagacaaatcatcattttattaactgctgagtaaaactcaacaaagtcaattcagccagtgaacagcatggttgtttcgaaggtaaaatttcactgtgggcttctgagggtggcgggacaccagagaatccaggcagccatcaggacctaagcacacaaaacctcagtaaaggcctgtaggtgattttaggaccatgagatcactactgatttggtttttgagcttttttttggggggggggtggtaataaaagcctgtgtggcctcattgcctgtggaaagttttatgttctataaaagacagctagccttttctcctcactagtcactagttagttcggacatttacagagcaaaggaaggactccagaatgtctccagatgaaaacgaagaaagcacggaactgtgtatgaggaattcagtttatggatcagtccctgctgggggatgctgggatctcagtggttcgctgattagggtcaactatggctagaaaatcatggcacatagaagtgcacgtagtcagacacccttcagagagttgaaaggcctcagaagaaaacccaaccctgccttgctgctgtgagtaatcttccctttgttctccgaagtaaaatcttattataatgttcacttttgtcagggtctaggctcttgcctatgcattattttcctcatgcaacaaagcaataaacccaagtaggtattcgcatgctcaggctccgataaacaagccggagcagctcaggcctcctttgatgactaaaatggcagtggttacaaccccggggcaacctgcccggtttgctgctctctttaaggaccaatctgtctgccctgcttttttttttttttcttttctgcttattctgcagctgaactcatgatctatcaggcaggacgaaggaccagatgggattttctagtactgggatactttcagggcttcagggtccaagggtcttaaggagataaggttagcgtctgaagcaagggtttcctaaaccaagttgtcacttgaagattcatggtcaccgcatctacagtagtctctggttaaacccaaaagaaggattactgagtgccaacccagccaggtggcaactgtgacagctaattttccgtgggtggagtgagataaagtctcatcaagaacaccaaccagcttaggattttccctaaaactctcttcccagttcactgccctcgcccttccctttcctttcgtttcattgcttaagagactgcttagtaagtggccaaatagttaagagggggttggcttggaagcagataacaggagatcttaactatcagtaatagccagtctcaccgcctcacaccataatcaggcaatgacacagagatgtttaaaaacaacgtggcttgggagaggaaacatttgattaagacactccccatctgtagctgtaaggctcacacagccactgtgtgcccaggtttcttgcacttccttctgaaatgagaaggaactggaccaactgcagttttctaatctccttccatcttactgttctcaaacatgacttatttatattgtaagtttgaaagacacacaaaatgaatattcaatttaggtgtttccttgtccatgatgagaaaactccaactcaagcttccattcattccatactttacaagcttggagagtggccacagtaacccagtttccagcattcagacatcagtaaatatcctttggttaaaatccctattccccaaactcactgttctcacggaagtggtgattttgctcagggaaatgttctgcaacatcaccgtgagggaccagacacctggagtctgaattttgagttcttgcatcatacctgctgtagcaacagagcccactccaaattctcagcccacatcattttccccaaacagtcctaattgccaaccctgtgtgggaatttgggagcctctggcaaacaagcttgaacactcctgacatttggtgcaagatttacacaacagcaactgtctccacacacctttcccgccaagtacatgcagacgtatacatccattctgcgccttcccccacccccgcccccacccccgccccctggagagaggatttgattgatttcattagaaagttctcctcttgatttacatgcataacagacagcacatcattgggagagatgctgtcacttataagaacggagttttcccatttgccccatgtccgtccatgttcacagagtgtctaagtcattacagcagagagggtggctgcacctaaccttccctggttctgtataaaaggtcatagcttgcattttttgctctctgaccaaatttcaaccagagttaaatggatgtatttagtgtggtgaacatcttcattgccagaaaagatttcagctcttcaaatttgagggagtatagccagttgggaaagggctaattattgttagtggtgatggtggttgggtttttttctcctctcaaggtgacagaagatctatggtgagagcagaaagatgtttcttaattgacctacttaaggtcactgcagaaaagggggagaagtccagaaggtcctgggagattgggttcacactaacactctgaatcatttctgatcagtttttttttttttttctatgctgaatcttgtcttatcctatgatccagttaccagttttggtatttttaagtctttctcattgtattttggggaatttttaggctgagaataaaatctactattggaacagacctgtgctctgcagaggcatcacgtgacccagacaacgggtggcagaatatctgggttcccctggagacacccccaacccctgggtgagctttagaacctaacaacagactgttatccttatcaccatcctctgggacatgggggatgatgcagtcagagccttgctacttctgggctttgtttctctctatggcaaccattttatcctgcctggaaatggcttcctgccctacgtggagagcaggcacacttacagccaaggaagtggtcaaacagatccctaagttctctccatgctacaacaaattccctaatacacacaaccagaaactcagctcctgggtggcttagtacccacaaggtcactttcctgttctaagagccttcggtatccagattcttctacaaaccacctcaactctttcctctttcttccctcctccataaaatctcagcatcccacccccacattgcacaacagtgatcagatcagctggtcactatagagatttgtatatattaaaacaaacctactttttggagaattttttgtatattcttttctatttgttttctacaaattgaggacagagctggcaaactgtgaatctaattttatcttgatgccagcagatatattttagcttcctggtatgaatctatgttactagggacaccatatcaccctctgatcagtattgcacctccaatctacaaagttagtttggcccaatcttacattctctcttccacaaatccccaaatttctttgctattatttatacagagaatatttatagtcctggatattacaagttttaa

SEQ ID NO: 1355 - DNA, 2127 bp, Mus musculus
cagaacttggaagccagtgcacttctacagctgagagaatggtcagtgccaacaatatgcccaagcaggtagaagtgcgcatgcatgacagccacctcagctccgatgagccaaagcaccgaaacctgggcatgcgcatgtgcgacaagctggggaaaaatctcctgctctcactgactgtgtttggtgtcatcctgggagcagtgtgtggcgggctgcttcgcttggcatcgcccatccaccctgatgtggtcatgttgatagccttcccgggggacatactcatgaggatgctgaagatgctcatcctccctcttatcatctccagtttaatcacagggttgtcaggcctggatgctaaagccagcggccgcctaggcacgagagctatggtgtattacatgtccacgaccatcattgccgccgtgctgggggtcatcctggtgttggccatccacccaggcaatcccaaactcaagaagcagctagggcccgggaagaagaacgacgaggtgtctagcctggatgccttcctggatctcattagaaatctcttcccggagaacctggtgcaagcctgtttccagcagattcagacagtgacaaagaaagttctggtggcacctccatctgaggaggccaataccaccaaggcggtcatctccatgttgaatgaaaccatgaacgaggcccctgaagaaactaagatcgttatcaagaagggcctggagttcaaggacgggatgaacgtcttaggtctgatcggattctttattgctttcggcattgccatggggaagatgggtgaacaggccaagctgatggtggagttcttcaacattctgaatgagatcgtgatgaagttagtgatcatgatcatgtggtactcccctctgggtatcgcctgcttgatttgtgggaagatcatcgccatcaaggacttagaagtggttgctaggcagctggggatgtacatgatcaccgtgatcgtgggcctcatcattcacgggggcatctttctccccttgatttactttgtagtgaccagaaaaaatccattctccttttttgctggcatattccaagcctggatcactgctctgggaactgcttccagtgctggaactttgcctgttaccttccgttgcttggaagataatctagggattgacaagcgtgtgaccagattcgtcctcccagtcggagcaaccattaacatggatggcacagccctttacgaggctgtggcagccatcttcatagcccaaatgaatggggtcatcttggatggaggtcagattgtgactgtaagccttacagccaccctggcgagcattggtgcagccagtattcccagcgccgggctggtcaccatgctcctcattctcacagctgtgggcctgccaacggaggatatcagtctgctggtggcggtggactggctgctggatagaatgagaacttcagtcaatgtggtgggcgattcttttggggctgggattgtctatcacctttccaagtctgagctggacaccattgactcccaacaccgaatgcaggaagacatcgaaatgaccaagacgcagtccatttacgacgacaagaaccacagggaaagcaactctaatcagtgtgtctatgccgcacacaactctgtcgtaatagatgagtgcaaggtacctttcccattcctggatatcgagacctgcatatgaatagtgcatgctggactccttaaaaaaaaatcacaaccccttgcatccattcttaccatgctttgtaaggaatcatgtcacccaagctcctgtggggcccagaccatctcactctgcatccagcatggtgggacatcagcaagtctgacaccaaaaggaccaatcagttgcttacttcaacagattcccacatccacctcacccctctaatttggtcaatattcttcactctttgggccaagaattggtggttgtcagaactttaatggccttcagatattctcttcctcaaaggaagggtcagaaaaatgtagaccaaatattattgactttatatagcatgagtattcctccctactctgtattacaaattgcttttttaaaagctcatataaaagtttaattggctgtc

SEQ ID NO: 1356 - protein, 568 aa, Mus musculus
ELGSQCTSTAERMVSANNMPKQVEVRMHDSHLSSDEPKHRNLGMRMCDKLGKNLLLSLTVFGVILGAVCGGLLRLDIHPDVVMLIAFPGDILMRMLKMLILPLIISSLITGLSGLDAKASGRLGTRAMVYYMSTTIIAAVLGVILVLAIHPGNPKLKKQLGPGKKNDEVSSLDAFLDLIRNLFPENLVQACFQQIQTVTKKVLVAPPSEEANTTKAVISMLNETMNEAPEETKIVIKKGLEFKDGMNVLGLIGFFIAFGIAMGKMGEQAKLMVEFFNILNEIVMKLVIMIMWYSPLGIACLICGKIIAIKDLEVVARQLGMYMITVIVGLIIHGGIFLPLIYFVVTRKNPFSFFAGIFQAWITALGTASSAGTLPVTFRCLEDNLGIDKRVTRFVLPVGATINMDGTALYEAVAAIFIAQMNGVILDGGQIVTVSLTATLASIGAASIPSAGLVTMLLILTAVGLPTEDISLLVAVDWLLDRMRTSVNVVGDSFGAGIVYHLSKSELDTIDSQHRMQEDIEMTKTQSIYDDKNHRESNSNQCVYAAHNSVVIDECKVPFPFLDIETCI

SEQ ID NO: 1357 - DNA, 188267 bp, Homo sapiens
acccctggatcttcctaccttagcactgctcttgtgggctatgaacactcgatcacactcacctaagactttgaggcaggcaaagaggatcacacacaagcttgtcccttggccatatctggctgctatcggaatgttgtccatctctttttgtaacatagcccttgcctcccagcatagaactccaaagctagaaatcttgagcatatataagtcaggggcttttcagagaatcagaacttttaacagtcctatggaataagggattacgataaacacacaaaattgtggccactgatggagaagtctgtgcaagactgttgcctttgtttctggtgttggacctaaaatcaatcaggccagtggtcaggaaggaaagctggatgtgaagtcagcaaagcaaggacaaatggaaaactgtgtttgtctcttgctgcctccagcctccatgatgtgagtgacttgtagtagaatcaggtgccctttgctcatagctgcacactcacccagtccgaactcagggaagccagaggaggatttccagcaggcattggaggagctgtgggcctgggtgctttctcaccccaacaagatgagctgacagatagtgacattacgtgtgagctgccacagtgtctgacgtgctcaaacaaatctcaaagcatgaaagtaggcattgcttccctctcctttccaaatctcacgtcaatttctcttgtgttcactctaacctggaaccatacagggaagggaattctgcaacctagtttcagtttccctaagttgacacagaacaaagcagtcacaaattatggaatactaatgctggaaaagtggctgtcaactgaggacaccttcagggagtgccagagaaggctcctgtttcatccagagtactttggttctgatttctttcgtgatgattgcttgtttttttaggtatccatgtagcccctgacatctgacattataccagctgggctttggtgcccaggagttgatctggcactcccaatgagactgcgatgctctcttgttgaagataaatactttcacagaatgccaatatctgtcagaattattctgtgactttgatggatcaagacccaaacaagaccacttcatatcttctgtaataacagacaaaagcaaggtgactatgcaaactacaaaggtgccaaatatccccttctcctcgttaatatgagtgactgctgcttcttcatcaattacagcggtaggctctttatagtcttttttccttttagataagatttattacatggccaattatagaattactcccacttcctgacagcatccaatccagaacaaagccccactttgaaacctaagatcacttaacagaaactcaaatcctgtaagtcctttctaacacactcttgatgaggcaccccttggttcaccatgatgtgcatcctacctcattgcaaggagcaaaaaaatcccacttgttcaattacaggtatgtttctagtggtctttggctggaaggcattgactatatatataatatatacgtatatataatatatatgtatattacaattacaatggcttgacttatgactttttgactttatgatagtatgaaataataaacaccggggactccaaaaggggctgggagtgagggttgaataattacctatttggtctcaaactcccgaactcaggcaatctgcctgccttggcctcccaaagtgctaggattacaggcgtgagccaccatgcctggcctgaatttgggtttttatgttgtcctaacctggacatgaatgaagaccttgagtctcattgcattgacacaactgcatgttgttctaacagagaattatcttaaatgatatcagatgagttaaaagaagaaagctgacagctaatggatgagccaaaggagtaagacacatatctttactcctgccttattttttctccttctttagtatgctatgaaaattttgagtgaaatactttggatccctagggcttggggaagtttatcttttcagggctgttggaaagaacattttggagtagcttggtagcaatttgtggtctctccttgcttttcttggcagcaggacttgctttccctggcagagctctgcccggatgtgctgttgaggcccagcattttaagaagactgtctcaatggctgagttttttagggctcacttcacgtttgtattccaattcactgagtgtttatccagaggcttggaagaggtttgatggagagctttgtcaacaaagaaaaaaaaagtcagtagataaaattagagaatagctttctcaggtgaggaatacattcaagactgaattcttggagaaaaacgaaccactgttatgttcctgaacttatggtttctaggaaaaagtaattccacacaagagagaaggaaagaatgatctttcttagtgcttaaatatgtgcaattcaggaaaagttgtttattttccattgaaaggggaacagggtgttacaaatgaagctgtgtccaggtgctaataaaatgaaacctcagagtgaactgggataacttccaattcactgcagttatgcaaaggcataatttagtcgtttagtctttgattaaaaaaaaccaacaactctgaatctgtaatctcaatttaaaactaaattacctggttgctatctctctctttctcttattaaggaaaatcactttataagaaaaatacttttgggatgtgatacacagcctttttcagaatgaccaaggaatttcataaagaagcgaacagagaaaatagaacaagaataacattgctggattttctgaggtcatcagattctggcttgggtccttgattcagtcctttatccaaatcacttagcatttaatcacagtgagctgctgttcagcaaagaaatccccccaaagatacaaaaaatctctccattcttttgctcctcatgaggctgtcactactgaatattgtaatgtcccagcagaacaaagggaaggggaagatggaggcattactggcaatcattgccaaggttaagagaaactaggggtagaaattaaaatagcagtaatcactctcaaagagtatttccacttcatacaggatcaagcagctaaaaaaagagacagttgctctaattcaaaatgttatggtttttatggtgggcataaagaatttgcactacccctgacatttagcctcaagtcatcttgtagaagaaatgctgacggagggaatgatatactgagaactcacaattcatctttttccattgtctcctttcttcatctatactaaacaaacgggatgaattcacactctttccgttagaattcatcaggcagtaagcatggctatccactgtttcagccttcccgagccctctacctaatgagacgatttctgcctgcagaatggattatatttagaccaagctctcagtctgaattgagatttctgtgaagtaatatcttttttctcatcagctaagagagtgaggtaaaaatagaactccctgacttctcttttgctaatgtgtgttaacaagaagagtgaatgaactcagcttgtatcttacagctccaaacacccttaagatggatgattcccttgagtctctattcagtgaccaccaccagactgacagggctacaggctggctcatctgtagctgtactgtgttgttgaaaccaaagcattaccactgatcttttgggtgatgagagtgccagcagctaggaagctgacatcatgaagatgataacagctcagtgtgccaggaactgtgctaagtgctttatgtgacatagcctcattcagttctcatatgagcccagtggatgggttcactactatacccactgatgctcagagggttaagtaacttactcaaggtcactcaaaatggaaagaaagaatgatgaactcaatttgaatctcactgctccaaacatggtcaagatggatggttcccaggtcggtctaattcggaagactgttataacttttgtggccacattagcattcttagttcaaagtcctggtggtgccactgtgaacattctcctcctgctacttattgctctaagcccacttatctttctgaaatcttttcatttccaatttagtttcaggattctcccgtttctctctttcatgctcttggcttcagaaccaacactgtcagagaatagtatctttcctctgaaattggaacactatataataattttcattcatgtttttcattcatcctaaaatagctcatatttttgaaaactagcaaactcgtattagttgtcatatgaaggagcccttactgtgtcctctgttttacttaattaaaaaaaacattaaggtatctagtcttatagttaatgattgggtcaaagtgttaaagacagatccagacacacagcttataattccttggttatttagggaggcagaggacattgtattcacacagtgtattcacgctacatgccaggacctgtgatatctgctttatatatataatttttgaagctacaagaattatttccattttgcagaggagggagtttaggctcaaagagatcaggtgacccactcaatgtcacttgcggagaaactgggatttgaatacaggcctgctcaactccaaagcctagatttactttaccaagaacagctgtgtggaaagtctgtaaggacaaatctgttcccagagtggttctgactttgcaaagaaccacaaatatgaatgccccacctaacgagctgatggtggatagttttctcattactaagttttggaaagcatcaataatcttaaaaagcaaagcagatgaaacagtaactgcacttggggggaaaagtcaaattcatatttctgggacgttactaaatgacagcgacttttgagtggctaacccttgggtcacttggctgttatttctctctctaggttactttcttctgataaactttgaacattgaaacatttctcctttattgtcatcatgagggggaatggtttattcagcagcctttcatgggaaagcaatgtaggacttttttttttcttttctatattaggagttccctcccacccaacctcccttatgtggagctgcaatgaccaatctgaagcattctgcaggagagccaagacaggggatgaatcccttacaagagcccaatataagggaatctttttctcttctttggtccaactaagctcctacaataattgccaaagaatgttgagaattgtagcatttaggactgaaaaatttgaggccatattgtgacttctcccatagtataaatataccttcttctgatttctagtaaatagtctgaccaagtctatttatctgctggaaaaccccacagtagagaggtcccacatgttatgggggctacctgttccaacaagtataacatcctcactccaagttgcatagcagagaggttaaaaagcgagattctgcaggaagactgcttaaactcaaaccctggcttcatccattagccctgtacagccattcttcacccttctccatcctctgtttctcagggaggttggactgcaaggactgcatgtgaattgtttcagtggactctcctgccctccagcttccatctggctttggccagtatagagccctggaaggaaaagaaggactggaggaaagtgtgcattggggtatttattcccagacccccttccagcagactgctatggccacagtctcagcttctgtcaagtggccttctgcatgcagaactctcctctgggtcctggtactctccttttggcttaggatgggcaattgttccctactgttagtagcccagggagtctgccctatcccttagagttttcctaccccctcccacacccttctaaatgactcctttattaaacttatcacaatttacttaatttaaatatgccatctttttttttttttaagctgggactccgacaaatacaaccactgactgtataaccttgggcaaattccttaattcctcttggtctcagttttctcctctgtaaaatggtggtttaataatattttctgcagaaggtcatcttaagaatcaaagtacaatatataaggtgcagtacattatgcatataggaattactaaggaaatgctaagctcatataactaccacaaagttctagctcacacactaccttaactcaactatagtaactcacttctgggaacttgggttaagttttcagtcaagaatcaataaggcaaaaaagaaaaaaacccttataatcaaaattcattttaaaaaatcccttacatcacctatcagaatatggtacagttgattttcttgtatccagtcctgcagagtagttcttattgacattgaagtttgagaacccatcagctagacttaagaaaggtaaatctatatgtaaatgtcagtcttctgcttttgccatgactatggggtccctagaggagactgagagatgccagcaaattccaaagtgttcatgcagcttgtggggtcggccttgttctgttcttcttccaaggttctgtcaacttattgccggctaagagacttgtagtttgccgtgcagattaaaaggagaccctggggtcacacggtaggtagggaggctaggttctcaagacagctcagctgtaaattacactgggtgaatgctgctgttcccatgtgtctaggatggttctctattgagcatgaaaaagatgtaagcatttcccacatattctatttaatcatcacaacaaccctgatgatgatcattattatcttctccagtttggggatgaggaagctaagatcctgtgcccagaataaggtaacacagagtctaatacttggcggggatagtatttaaggcaggattgtctgacccagagctgagtttttattcggcatggtcacgtggttgtacagtagctaacccctaatgctctgtgagtgcacaacataagaagaaaactctatgtttttgtagctgctcacattggttacctagaataacatacaagtgtttgtttgcctggaaagttttttattccctgtatttaaaggcaagaggatcagccctgtattctagcaatttctttctgaaggctaaatgtaccatgctccaactacttcttggggccctgtttccagacccttctctatgttgttgaaccacttctagtccagcacttcccaactctggctgcgcagtggactcaatcacctggggaagtcctttaaaaatgcccaagtcagcccccgcctaaccccaaagatgcatggaccagaaatctctgaaaggtggcctgagtattactattttctaaaaggctctctcagaccattttaatgggcacccagtgttgaaaataactgctccagtttgttaaaaaataattggtgtgaatattggcaaaagccctctggcacaaagaaagagaaccagtttcttctagctaatgtttgttagccagaattatctgtggcatagtccatgtgacttaatagacctggtcttccagggcagctgaatgcaaatgtttctcacgtgtagaacgggatgtcagggcttacagagaaagtgggaaactggaatgatgactccatctaattcggccatgctggatgattcacctggattctctcatgtcctgagcattgaaaacataatgaagagtttttaaattgaatgtttaaaagagtgaaaacaactccatccctttttctgtttccttttaccttgtatttatgtaccaccaggtaccttgctcttggcagtgagcgtgaatgaatggcacagctcagcccctgaagcctgtgtgcagagattgagggattgtgatggagtagttcattcatgctcatgttaaggggggtgctaatagcagactagtgctcctgcgattattaatatctaggtctgggacagattgtgatggcttcttttccagttgccacctcagcagaaagggaaatagaaaaccctaacttgtaaagttagacaattagactgtaaagtttgtatatgtgacaacttcagatacaaagacacacacttacccttgacggggcttaagaggagagtgtcaaacataataccaaagtgaaagaagatagctcttcatctacaaattatttttaaacacatttaccaggttaaacaataactaatttttcggaagagaagagtacccaaagtcaaatgccctaagacgaagagatgcttatggcatttttttttaaataaagaaaatgcaaagttagagtggttctgaaggaacctaggatgaataaggtacagacatgattattctaatggtgcagacaggattgagagagaaggggggaggggagagatggagaaaggcatggatggaagatgacgtttggattcagattttggaaaggagagtaaaggaaggaggtaagcagagatttattttttaaattttattaatgtgttttcccctctttttcttgttatttttctcatctgtctgttcatacttggatattttgtccaataaactatcttctaaggactctgaaaatgcactgaatatttttggagggtttactgggtgccagacgccactttaggagttttacatatcctctccatttcatttagttctcttagcacagagaagtgggagaagatagtcccattttacaggtgggatgaagagagagatggaggaatttgccccaggttactcagctagaaggtggtgaagaactcaagccttcggatatcagcgcctggcatttaactaccaatcggtcctgctgggactccggctcctctggcaccatccccgggacctactcagagagtttgcacgtggccggtcgcgttccatcgtctaacaaggtccagcacagcgcaaatccgaagatcgtctaccccggggaaaaagagagtctgtttaattctcctgtggccctccaagtgagttcttttgggttccattgcctagacgaggaaagtgaggctttgcctgctctgcgctcacagggtcggcaagtagtgggaccctaggttcctgcagtattccagagataatcaaagctgcacaggtctcgtcatttttatgcaaaggcgtccggaaggctcgaactctcccttgcacaagcccatctgtctctgtgcgccgcccccgggacacggaagcaggcggcgagcagcgccgagtgggtggagaaccgtcccccgccactcacccctcggccaactctccgcgccttctcagccggcacccacgaggccgacctctctcggcctaaaaaaaaaaaaaaaaaatcccggcctcccctgcaccccgcccgccgcccccagggagctgcattaatattaatctcgctgaataattgaaggccagagatttattcgagcttcggcgggggagggagcgcagctgggccgcgtttaggctgcaccacccgcgtgtttcagccgctcgactccgctggacctgggacccccagacgtgggaggatggggtgggtgtgcctgcctgtgagtttgggggtgagtgtgagctgaagcgggtgctccggggagtgaggagggagcgccaggggctgctccagggaggcggagacggaggggcatcccgggtctccgcgcggtcgcctgcgcttcaccccgcacggggtgacctggggccacgcgggcttcaggggaaacaatagctactccttagatcctgggctcctgccaccggctgcccaagccttcccggacgagcggcggggcctcttttcttatttggctaatttatggcgagaggctggggggagggatggcagaggagggaccgcgactggagatgggggcggggggcggcggttaaaggagttgcccgaggcggcggcgcgggtgatgtcagctctcgacgaaaatagagagggatcgcctgcaaatccccagctccggcggggctaaaccttgcaatccctccctggccggcgccgagccagagcgcagcggcctccaccgcctccccaggcgcgcacacacccgcacacgcgcacgcacgctcaccgtcctctgccaccactctctgctcccgccactcgccgcgcccgcgagccccgcagcaaagcacaggtggcagcggctgcaggggcgcatcgccggcgtgcgccctcctgcagccctgggcgcatcgctctctcggggaagccaccctcggagcccccggagctccccgccaagcgccatccccgcgggcggaggggagcgcgggtcgcgcgccgtggagagccgggacgcggattagcgcccgcaggagcctcctgcgcccgttgaggcgctaaagggcttaccccggaggcgggtggaagggcgggcagaggctcctcttaaataccgctcccggccgcacttcgcgctcaccccggcgtccgctttctccctcgcccacagctgccggatagtgctgaagaggagggggcgttccccagaccatggcatctacggaagggtgaggggatttttatctgtacccgcgggaaagcggggtcacgcgcggggtggtggcgcccctatccgggatgcggatagagaggcggcggcggcgggcctcggaggtggtggcggagccgtagcttggctggggatgggatggtggggaggggattgattttctttcctggagattgctgcttaatcctttgaaaatgcgagaggtggagggttgttttattttgataaaaagggtaaggtgcgctgggggcctgagagtgtgaggaagaaatcctcttgaggttacttttgggatttcaaaacaataggggattgggcatagtgtgagcagacaccggggtagcagcgcctggagcgcggcgccccaggcccgaggcgggcttgcaggtggtgccggctcggaaggaatgagccaagacagggccctggggcggggcaaggaccagcgcgcgcggccttgaacgccaggtttgcagagtcgccatggagatgctgggcccgctccgatcggtccttgtccctggaaggcggaatctccctggctagctctaaggaagggtggaagagatttgggtgcttcccgggaggcgggaaaacgtgtggtttgggacaagggcaggagtcgccagactccagcgggcagggatagcattggcttccctattcagcccgaggatctggagtcgtgtcctgcctcccaagattccagctggcatggggaaagctccctcgcagtgataactaaagacaattgtctttagcaagagacagaaggggctgcagggggcaaaaggattctttgaatactcacacatcaaaggaaaggtccacagagtccttggaccagtatctcccagaaaactttttgggcttcgtagaacctgagtggcaatgaaaagactgggcagctcagccctttggttaattcccaaaattgcagttactcacttgcaagcgatcacaaaatccatgttatgtgaaaagcaaatatcaggggcttctctgggctcaagtggtggtgttggcattttccagtttctcctaagaaattttaccaactccgcaggcttgttttaggggaatggatctctaaacaggctgaagagctggtatccaaagccagatctctagactgcaatctccaatagaaggaaaatatttctagaactgtctctctgtccaggagaaggaattcattcattttctgtcccccagagtccttccaaaggcatctggcatcttgtcattgcatgaaattttgtctctccctttgccctattttgcagtttagacttttttgattattatttctccaaaaagatgtttcaggaagacacctgtgtacaaggagggtggtaccttgtgctaaaacagatctctagaaatagatactaggagcccatatggatcaagatcagtgtcttaccatgtttagttaaaaaggcttttatattagaaaagatatgaaagaatttctggttgccttcatggaccttctagacttatccttgcttgtaaaggctagggtggaaaacatctgtgaaaaagatggatgatattagtcttccaaatcctgcatccagctcactccctattttgatggccagatagagaaggagaggttacaacaacaaccccaaactaagtaagtttatttcacctttgtcctaaatgaaagctgtcaaatgatgtgacattcaatgtagagccaaagtgattttcggcattttagaaagattcccatccaattaatcccatctttctgcactgtttatggttaagaaaagattcatcagaggaacttatatttaagagaagaaagaattgaaaaaagttgaacggctgggaaacaaatataggatctatgacccattattatttaacagcagtaactgatgagcaggtgacattctcagaagccctggtctttcctttcttcttctcttcttttcttgcaggagcatttactgagcacttgttgagtggaactcacatgtgaggaactccgagttggggggatacagaaatagtctgggatttgccttttagaagtctagctccatccagtcaaggatttttattagtaaattgttcacgtggactcatgagatctcttgcaacttctaacatctttggttaatgtgccttgtaaagaaaaatttactaagactcctcaggctgtctcctttgttagcttttgccctctaacaatattgaaattgtttccttgaaacatacattactgagaaggaagcaaaaatagcaatatagttatatgctttcaatttatatattttcagttcaactttgtttgatccagaatgtttggggaataggataatatgggaaactgaccattctggttcacatttatttggtgatgtaattatcagccgcagaacatgttaattaccaatttctaaagaattattagaagcaataatgacatcttatgtttgtttaacacttcactttcaaagctcattcgtgtacctcatcacatttgattcttccagtaactctgtgaagtaggcagtccaacaaaaatagactttaaggataaaattatatatagggaataccatcttttcagaaagattccaagacttggcaaagctttggggttatcatctgaaaatgatgtgtgctgggcatggctggtgcagattactggctttctctcaaacttttggcatacctatcctgcaaattgccttttaggatattctctttgtaacctgtgcattgatctttgcctgtacagagcatatgccaccacagtctggttttttgagggctttgattatttggaattgagattattagcatccagtttctataaaaatcaatagtggactctttggtagttcccaggctctgagaggtattttcctgcaaagcaaggtctaatttaatagttgagcattcttttttctgagtcccctgtcatggctagaattacggagatggcttttaggtccctgacccaaattggaaagagattataagtagttggtggcagccaggctagtgtccattactgactgggtcacagtggagtgtccagatgctgaagaggcaggcattttagaaatatcttcttggaggtggggggtggctaggtcactctgtatgtcagagacccacggcaatctgtcttctgatcagctcccaggagccaagggtcaggggaaagccagccatgagggcttgggcttcagtttgacttaaagagcaagggaaacagaaaactgctgacagtggaaaaaccctggcaagggagaccccttgaatttattatttcaagcaaataaaagcaaaccataaccattgtcctcttgcttctccccttgggaatgaatttgaggtcagcaggaggaagaccctacagcgtggacttattggaaagtgagtgaaggatgtggggcttatggtctagaggggtttgcaggttgcatgcctcaggcttggctggaattttcatttctcattttcaataatatagaaatcagcctccttggggaaaatagatattagtagagctatgagaaaaccatttcatgtttactaagacagtcgcttgtgagtaattgaaagcttaattctcaggaaataatttctaaatccagatgaaacttgtgaggcagaaactccatgttattaaaaaccaaaagacaaatctgttcatcagtatcaatggccacttcttttcctcttccatgcaacacaattaggtgttttgtgtctcctttggctttggctttaaaggatgtgtcagacaaggaaaagtccttaagtgatgatgcttcagctgcaaaaaacgagcaatatatttaacagctaagtgtgagatttctgggtcagtgtgccataaatcctacagttccagaattgcaaagctttttcatgatttgaagctcaacacagagtgatttcaatgtaaatcctcccctccctgccctcctccatggctgtgtcacacaatgccctgatgtctggtttccccccttttaaaggcaaactgaattgtttctcatattgaatttttctcccattggactggcttgcctcttggcatgagctgaaactattcttcatttcagtcgcctgctacaattattttaatctactaaaacactgatagtattaaatcttctaggaatagtaggcagaagcattattctgaagataaaattttagttttgcttgcatttaaagaacttgtcttcgcagtctgaagaaacatctaacaaacaccagacactgccttgcttgcagcttttgatttcatgcccttaacagcttgttgggggccaggcaggatgcttcatagaaagggttttagaatccagattatggcaaatctctttatttaccacgatcatgagcttgctctctcctccctctgcccgcccctcaccccgcaactctccaagtgccaactccttggaacgaattaattaaaggaatgtttaaaaatatctctttgctccatcttcaagtgctccatcattgactggaggcagatgggccacatatttgtcggtagaatagaaaaggactagcatctcattataaatctgtctggttggctttaaatgatgtcagaaaagacaatgggcccgcagtattaaaggagaatgaaaggaagatctttaaaattttaaaaagaagacccattttcttagtgctctggtttttcttttaaaaagtattgtttctcaatggtgttgatatttatttatttttcattcatgtatttaatgtctcacttagataaacagatatgaccactgttggctgaactgctgtttggtgtttttggcaatctcgacagttgctttagaatatggactcactgagcaagaattgtcctttgaaaatggaatgaagggaatgaactcgatttgatggctagacttgatctgtgtcaatcctggtctctaggatagatgatggcaatgttaaagaccttgaatgatgtttggggtcaaggagggagatgctgtccccatgcccccctctattttagaggcttcacttaaatcactgagagtactttcttctcttacgtttggtcaggagggccatctgtcacttgctgtttgtaatctggcacaggactttctgtcatgtggttctgccatcccaagttcccagccactgtgctgtcaggatcacagagctggtgacgaagttggaagtgaatctgagacctgtctgcctcccgctttgcctttttcccagcactggacatgaggtactgggtgcctgtggactgtatgtggcccatgggtatattcttataggctcacagaggattttgaacatgttttaattgttcacctatacttacttttaccttaaaaaaaatcctgattctggcttctcttaaaaattgggagatctgatgacaaagaaccttcccttttatcttggtaccatttattgagtgattatatcccagttggctttaaacagtttaatgtgtatcaatttatttaatccccacaacaatatgatgcagcaggagtgactcttagcctcattttacaggtatagaaactgaggcacagaaagagtaggtgaattgcccaagattttacagccagtgagtggcaaagctaggctttcaaaccaagcatcctggctctgggatccatgcctgtagttactaggccatacctcttagtccagcagggcaggggttaactggggctgaggaatggccatctcctgagatagggcatatgcctttcaggttgggcacagtctgttctgagactacttttctcatgttacctgcctgaccccttacctttccaaggaagttattgagagattgaaagcatgcgtaccattctcttggtatacaccattgcctagtggttttggatttgaagaattattcaaaatctcatttctatgtaaaaaaaaagatctttcaagctacctttccccccaccccccaaagcacttcttgttattttctttaactttggtctgggttgtacataatggagaggtcttttgtaattattggtttggtagtcaggaagccaatagcgttgtctggtctagaggcagtgctttgaaagagcccagggcatgaccacatgggtcccaacctttgggatattgaattgagccttgggtatgtgctttgtagtggcaaatgtagctgagcttatagcaggccctggaatttatgttttcttttgcagccttcaggtgtggctgtttagggttgcgacttaacttacgctctttactgaaacagcgactggtcttgtccctctaggagtggggctgatatttatttcatagcagatgcaaacagtgatgagctaaggatgccttttgaattgaggaagaaatctttcagaggcgtatttctgtgttttaaagagtgggacagtttgctcatcacccaacagatggcagtaaatgtcagcactttgtccacactggtggtctgactccctttggaagcccttcaatccttagggaatcccaattcccatggcatttcattctcttttgattataaaagctttctccaccaagtatagaatttggtaagagtgaggcaattgacatatatctacagtgttccatatcaccataaacaaatataaataggatcagccaagcttatgtggctatatatatatgacttcatttcatccttgaaaatcccctagggaatattatctcattttagagatgaaaaaactggaacttagagaagttttgattttatgctgttactgagtttttaggttttttttgtcatctaattgtactgtgttttgtattatccatattttgcaattaatccacatttccttaaaatttcatggatccttcctttgctttttatttttgttttgttttttttttttgctccagtaagtgtcttcaataatttcattcaaagaaagcaagataacctagtgtctctgaagaaaaaataatgtaagaatcttaaattcttaaagaatcttaaagaatttaagaggcaatgccttaagaaggacagcaactattacagaaagaagttattctttgagtggagatgtgccattcaaaagaaaatgtcaccataaaaaagtgagaataagtttagttaattgaaaatgattgtcaaacctatttgtagatgtcaaacaagataatttcaaatggaagaagtagtagtacatgaagggagataggtaaaagaaaacagagaaaagaagaaaatcattcttctctcttagatatcatggaaagctaactgctgcagattgtgtttaatctcaatctttacttaaaaggacagttgggctgggcatagtggtgtgcacctgtagtcctagctattcgggaggctgaggcgagaggatctcttgagcgtgggagttgggggctgcagtgagctagctataacaatgcctgtgaataaccactgcactccaacctgggcaacatagcaagatcctgtctctaaaaaaattaattaagaaagaacagttggaatctgatagatttcttaggaaagtggatggacatcaacatgaacaaaacccaattaaacaaacttgttcaagagtgaaatggatggttatcaaccaacaacacacatctcagacattctaaagtggctgatggtacctggggaattggttcagctatcattttttctatttatatgcaacatatggtctagaaaaggtgtgaagaataaatattgggctaatttctaagaatagattagagagtaatggaattatagactgaatctattttcccaggatttttctggaactcaatcccatcaatcagcagatatttataaaatcatcatagaatcttagcatttgaaggattattgatttttaggtcataattaattgctaacatttcaaatgtagaactcattatctattagtctgagagcattgaactttagattcttttcacaggtattgatacactggggttgaggtgtcattggttggtcccaggaagcagattctgagatggagacttgtgtgcatggaatttattgggaggagctttcagcgtaaatccttatgaaggaatgagggaagccagggtaggcagagggagaggttgaaacagtcgcaccaaagcctgcccacccacaaggagctctggaacagggatggcccttcagaatgatcctgaattgaggaaagagatttggcctttctactcctgcattaaccagccattgaatggggctgtgctggaacgggacatggccctcggtacagggcaaggcttggggttggggggaatatagttaagagctgtcacttatcaacatgcccagcagctgggcaaatgaatcattcagtcctgaatgtggggggaaagggatctgggtagcatgtcacagcatccaccactgtttccaaattcaaatgttagaaagataataaaataatgagtctggttgcttgtgatcagaatatccaggcgtccacaaagctatcatctgtaataaaatgctataccttgctggtcaagtgatacaaaatttcaggtagtcaggaggaataacattaagtgatctattgttcagcatggtgactatagttgacagcaattgactgtgtacttgaaaattgggagaacagtagattttaagtattctcaccaccaaaaaatgataagtatgtaaaataatggatacattaattagcttgatttattttattccacagtgtatgtgtatatcaaagcatcatgttgtataccacaaatacatactattttttttgttagaaataaataaggaactaaataaagctctatcttaaaaaataaaaacctcaaatattacaaaatggcatacagtaaaaaagtaaaagactatctccggccccaatcctgttctccagaaatagtcatttttttttgtctgccctttaagacagggaaagtggattctgatgggcaggctggggagaattcaaggtcatcatcttccttaggtttatttatttgtttatttatttatttgtttttgagacagagccttgctctgtcacttaggctggagtgcagtggcatgatctcggctcactgcagcttccacctcctgggttccagtgattctcctgcctcagcctcttgagtagctgggtttacaggtacgcaccacgatgcctggctaatttttgtatttttagtagagataggatttcaccatattggccaggctggtcttgaactcctgacctcaggtaatccatccgcctaggcctcccaaagtgctgagattataggcgtgaaccaccatgcctagccatcttcctcagctttagctgtgtctcacatagtcaccaagtacataagagagaagcccttctcttcattccagtccttccaagggtgccatgtccaatggaaagatggttatctgaaagtcctgctatagagagagaaattagttacattaatctaatttctatctagagtggtgagtataatggaaggggtcagaaggaataataaataaatatattgggaacaagagtatagctattattgacattttcagtgttgacagcagccattttcacactcctgcaagtgttatttcccatggagtccttacctggggaaaagtgaacaatgaattaggtaaatcctttctggaatatccactgcattgttctgttgattcaagaagtcaggtagtctgtcaacttcaagccaaaggtacgtatatgttgacatttctctgttctattccactggcaaatattaagatatgttcagaggtgaaagaacacttttgtacacacaacccaaggtcttgcaaattatatcttcgtgagtgttttcccttattttcttgcatcagttgactctgctttctgagaccaagacattgattatcattgtgtttgtgtttttatcagcacaacaaattaattccagtgactcaattgtagagcaacagaaggtagagcaagccaaccaaatctcattggaaattgccttgcttttctttccttacctgtttttaatagttacaaatctgttatttaccatggcagatcgatattatgcatatttccagtttatgggtaaagatgtcactgattacattcaatctacatttaggaaatacatttttgcacatagaatgtaacagccaaataaaagagtgtgaatgattcactattcactgtcagataaattatttttaacaaaaacttttacccttttgtcctctggaccagtggctccttccccatcacacaaaaacatggctttattaacaataaaagcaaaacccttaaatatacccggcatacctgaaactgggaataaaaagaggtttaattggacttacagttccacatggctgaggaggcctccgattcatggcgagaggtgaaaggcatttcttacatggcggcagcaagagaaaaatgatgaagaagcaaaagtggaaacccctgataaacccatcagatcttgtgagacttattcactaccacgagaataccatgggaaagactggccccatgattcaattacctccctctgggtccctcccacagcacatgggaattctgggagatacaattcaagttgagatttgggtggggacacagccaaaccatatcaagggggatgaggcactgagactagttagaagatggcagcaatagtttaggtgggagattatgacctgaattaaggtatagaaatgagcataggttaccagattccaaggatatttagaaggacttggtgaccaagtgcaagtaggtgtgagcaggtggaagggcttaaagccatctctcagccttctagattaagcaaatgggggcgaggtaagtgcagaaaaaggaattcaggagagaaattaaatttgaagaagacagtgaatttggttcagcatactggcttagcatttgtggcgagtggaatatcagtagagatgttcactgggcagttagagtcatgacaggccggggcctttatggagtgctatttgtattacagatgtaagggagctcacccgcacacagcatgaagctagagaaaagaactgggctaagagaagcatcctgggaagctctagtatctgaagatgggcagagggaggtgattcacggggtgcggggtgcagggtgctgagaagtaaggaagggagtcaagagtgagcaggtgacttgaagtggccgacagtgctgcatgctatggagaggtcaaatcgtggaaggactgaaaagtactcattggattagtcaatttcaaggccatcattggcctttgccagagctgggtcagcaaagtgatggcagctgttgccatgttggtgtgggttgagaatgggtggagagaaaatgaatgcaaattatttttttccataaatggtagtcaagaggtagatggtactaggaaagcagataaggcaagagcaggattatatgttgggttgttttagttttaggccaggtgtgctataagcctgttcatctgctaagggaagggcttgattaatgaagaggaggtcttgaattatccgtggaagatactgatgaaggaaagagttagaacctgaggctaattcattgctcactttgggggttcctgcaggaagagcagggtgcctctgtgagactgatcccacagtataggggagcactactcagaagggacagggaggaaatggctgcctgcctagatggtcaagtccacatgatcaaccctggtcatctgtagagtgacagatggggcagccagcttgtccttacttctatagcctcattagtcagcaagctagagttggatgtattttagtagtgcttgctgttttttttttttttaagatttaccttttaagtcctttctaagtctccctagttggaattcttctctttcttcccttaacccttcatcatttatgctcttgcatagtttgtgaaaattttattggacccagttttaatcccaatctcctcttgggctctgcattccctttaaatcacttcctggatatttgcatagcacatgtatcctgataactcccaaatgtatgtttctatttcaggccttttttctaggttctagattcatatatcctacaacctaactgatgtctccatttgtgcaatgcatagatgtctggaaattatcatagtacaatggaactcttgatttttttttccctacaaactcatctgtacccactcccaagtttccccatctcagtaaattctatctgtttagagattcaaagccagaaatgttggtattaaccctgccttttttttcttccttcagcctcaacctacaagcttactaatttctacctcagttcctcagatatcccacggtcttgcccacatttgcattctcttttccagaaccactttctaccctaccaccattccacagatgactggcaccctctgatcctggagcatgctttggtcctcagcttgaataatatttcccagagaggccttctcttcccattccacctaaaataggtctctctttcctagtcctacctcattccccttgtttgcttccttcactgcatcaattacaacttttacatattttatttatctgtctgtttgtatctacaaagtaagcactttgaagactagttcatcatcatgtcctcctagatcctaatgcagtgcactcagtaagcatttgttggctgaattctcatccttgtcagcctggagaaggagggaaggcttctcagaagaggtgatgtttgagttgtgcctcttccagggagtctgtccttattacactttgttcagacctctctcatagcaactcatcataacagagtgtgctaagtgttttcttgtctgtctgttcactatcctggtatctctctgaggatcagggttacattaatttctttgtgcctcatcttattatcattatcacgatgaatgttagtataattgaattgtctacctcgcaaaagagatatgcaagggcatagagacgacagaagggaacaggtgtgggaggcaacagatccaaggttgagaaaacatttccttttgcttgttgggtcatggtcatcttggtaaggttctggtggtcaattgaacatccccattcctgcctaccagtcaataattaccctttgctaggggttaatagggttcaaggaggttacaagaataatcagttgggaagcagctcatcttgtgaagccaaaaatgtatttgtcacagtcattcatgtccccatgcagctgtctgggaaaattacaaactcctgtatctgcagttcttttaaaatgcaatgaaatttcatcagaaaagaatctttgagcccatcctctgtctttcccaggatgcctgcctcctctcagaatcatgtctgtctattcctttccattgttctttgtaaaggaaaacaaggagaagctagaatgaatttgatattcagatacaaagaaggaatttcttaagtcaaagcagatttttcaattacattagttaaaaaaaaaaaaaaaatccagggcttgaaaactgatttagaaaaagaaaagttaccagaagcagacaacgttgttgttaaattgatcttttaactattaaagagacacttagtatgtttaatcagtctcaatagagttcccttactctggttttgtatgggtctagaaataataccttgtagttggtatgtgtgttttccagcaacctaaataaaaatgttagctattcttatatttcctgaaatggagttcttttctggagttttctggtgactggacatgttgggagatatttattgcatcctggtgggataagagaagaaaaaccatggctggcatcttctttcttgactctgcgagtcctcacagtgcgagtcctgtgattggatgaaagatcagtttataaaatccccttcctgagccttatgggaaagtcttcagctgaagctatcctcatcatccttatggaaaatgctagaatcctcctagattcagagccagggcactcaaactgctgtttttgaagtgaaagtagagtcaaagccgagatgctgggttttctcgtctgctctgacagggaagccattgttagttgcgagaaccaagcatatacagatttcatttttactttatttgctttctctctccctctgaagactgtcaatggggttcaaggcaagtaaactctagatctcaacacaaaattcacacgtgattgtccagtggtcagacagaccgggaacaatttgcccagcagggagcactgtggagccacacctctgaaccatggtgattttcctgctgctttgaaggaagagcgagagggcaaattacctctttcccaggccccgcaccagctgttgtcttggtttccaagaagggaagcccaaccactttgtttacattccaagtgacctggagtaacaaccggggaccagctctctggaggccaaggctacacctgggacaactggctgaggttgaaagtgagttgacagcagttgccattcaccagcgggtcctgggtcctcgtcctcatccttgtctttgtcctcttggcttcccctgggagtcatcagcggggttcgaacaagatttgctggttccggagcttgggtatgttcagcctggttttttctgggttattgaaaaatgttttaaggtgaatggggcaaccctgggttagaagggaggccttaaaagcaggaagcctagacactcaagggattgaaaaaacatttggaaagggttggaaaggccccaaaatcaacaacacaagaatggaggcatgaaaacaggtatttcttttcaaaatgacttaccagccacccccaaagtctagcttttaacccaatgggaagcaagcaacaaaattaaaataggtgtgaaaacgttgtgtttttggtaaagggcacactgccttaggaggcgcccgtggaggagcagagactgatccacgtgtccatatgtttgcttagagaggactttccctctttgcctttgagctaagctgctgagccaagccagcaagatgaagatgttcccttgcttttagggaacaggaaaatcaggattctgtccagctgtggctctagtttctggttagggggcattaaattaatccttgagtttctcatgtcataagatcacaggatatttgttgaataaataaatgcatgcagccgaagagctcactggatgagttctttacctcaagaatttctggtttctccttcaagacaatcttagattatttgggcataaacataggaaccctgggaagcaggacctgctttatggatatgcgacttaggcagtccacggtttaatgctctgctcttatcatcttgaaatgtttaatttgaacaaggggtctcaagatttcattttgcccaaattacgtgcagacccacacattatgtagccagtcctacagggcagccacacatgtgcaggcttgcatgaaatcctcttaccagtgacagtgaacatggtaaagatgacagatgaccttgagacaatctgccttctggcagtgcactagaatattctcataaggagatactttcataaaacagcttctgagccagtgttgcacagcagttaagaagacgtgttttatactcagaaagacctaggcaaaaattcctgttccaccactcagtagctgtgtgactttggggaagttaattagcctctctgagactcagattctttatcttttaaataaggacaatatcacccacctgatagggttttggaatggatgaaagcaggatgtgtgtgaagcgttcggcatagtgcctgggacctggaagatacctataatgttgattgtcattgttcttcttggaatagcagtactgtgttacttttagtctgttgagcttagatggggttatccatcagtctcttgactttgcaaattaggctgctaacacttggtgcatacccaaaggtatgtttgctaattcttttccatagagccacaggtgataagattagaaagtaggccctgggcttctttgatcatttgagtgctgtatttgctctagcgaagggttgtttgaagatttttctcttatgtgcttttaatccataactgtttttacttccaacacttctaactccaaatgcgtggtgtctttcccgacaccaggcaggtgtcctgcaagtcagttcagttctgatgctatccacctgggctatggctatcctacagattgagggctcagtcccatgaggttgccttcacttcaggtgtcagtcacaagtcccaggttgtctctggtacttctgactgacaggctgtaatttctaatttcagggggtttccacaacaccctcctcaagttcaataattccctagagcagcttacagaacacaaggaaacattttactgatatttaccagtttattataaaggatacaactcagaaacagccaagtgaaagagatgcatagggcaaggtatcagggaagggctcggagctttcatgcctctctgggtgggccaccctcccagcacctggatgtgttcaccaacctgaagtttttcagaccccattgttcagggatttttatggagggtacattattaggtatgattgattaaatcattgaccattggtgattaacacaatctccagcccctctcccctccctggaatttggtgggtggcactgaaagttctaatccttagtctttctggtgagcagtccccatcctgaagctatctaggggcccccagccactggtcatctcattcgcacaccaaagtcacccaaaggttttagctatgtgccagcaacttgggacaaagaccaaatatttattttttattgtatcacaaccctctaatatcaaagtctccccaagcaacgagtgcctgactttccactcattcattcattcattcattcacaaactttctaaaaatataactgattgtttcaggtgatgttgggtgggggcacaggaagtaaaagatatttcaagcctaggacaggcagccactaggcaggagcatcatagagggcccgagccttggaagtagggggtggactggatgactgttgtttcctttaacactgagggtctacccccaccaatatggcgctttaaggtttccaacactttaaagcatctggaaggccaagatgagtttgagaaacatgtgacagaatgttacaatcagcaggtgagtaggtacgtggataaagggaatccatgtggtgtagaaaaaaaatgctcatctctgaaataaaacattaaaaaaatagtatgcagctaggacgtgtaaaccaaaaataaaattctaagctccccaagcaacggagtggacccctcctctcacccaagggcattctaaagcaaacctgaaacgctggtttaggccatgatgaggatgggtggttgaacatttctcattataccctccttcctttggaattcaggtacagctgactagcattaacattaaaagagaccttaagactgacaaaaaagactctttgtagcaataagatatcaacatgacggataacaggccctgaaagaaatcaaagtgttttaccctcaaatatattttcaacatattttgaaatgccctgcaaaagctgtctcttgtggggaaaatctcccttctgtagaaaatcctgttccttttccaggtctttttttctgatccaggagagaactaagagtctgacacatttttaagtctgataagaaacacttacagtccattctctctgaagcctgctacctggagacttaatctgcataataaggaccttggtccccacaaccccttatcttaacccagacactcccttctattgattccaggtctttaaataaactttttcaaccaattaccaatcagaaaatccttgaacctacctatcacatagaagccccgcccacccacctccttgcttccagttgtcctgccttttggaaccaaaccgatgtgcatcttacatgtattgattgatgttttatgtctccccaaaatgtataaagtgtgtaaacaaacaaagccatagcccaacccccttgggcacatgttctcaggatctcctggggttatgtcacgggccatagtcactcgtatttggctcagaataaatcttttcaaatattttacagagtttgacacttttcaccagtaaacactaaaagacttctatttgattatttttcaggagaatcaagtagttagacttaaaaaaaagttatccctctagaaattttcatgggattgatttttcatggatatacctataatatatgtggctggagtaaaccatattaaggcagcattctgtaaggatggagagtttatccataacgaatttattcatcatagatgaaatctatactaattagacacaagcatgatcttcaaaaactccacaatacttatctcactaaccaggaataaatgcctttaacattggtatattttatttcagatgcatgtacacatgtcaatacattttttatagtgggagcataacctacagatttttgcaacctacaatttttacttagcaatgtgttgtgaatgtatgttaataagtgaatctataaacttgtttaacggctgtatatagttttcattttttggaggtaccatgacttttacaaactatctcctattgttggatatttagcttgtttctaatttttcactattataaacgttttgcatgtacacctatgctgacctgtctcactatttcttagggtaggttgctagaagggaaatcactgggtcaaatggcacacatactcattattttgacacatgctgccaattagccagtgtctgaaggggcaggagattctccaatgcagttgtctttttgagtcccccttaccgctatgtctcttacttgcagttgtgatatcaaatggctctggggttgactttgaattcctcattacatggcaaaatcttcagccaggtttaggctaaacaaaaatctttcttctgtatttggtgagctttttgttcctaggttggctgtttatagctccctaatctttgacatcccacatcaccctatgttgaaattgtcattttaaaaatgtaaactgtagcacattctctaatttctttctgtaattgtgcagagttcacattgtatttctaagaactttgctttcttctactgagtactttctctaaaatggtggctcccgactttattcagggctggtttcttctttttggccctgcagatggaaagagctgaatatcccctctattttgagtaggaatagatgattgaatactccgcatacaaatggaaaacgcatcatctatctgcaggcatcatgattaccaggtttgattctcatgttcgtaactatcttgtctcaagacccaccattgcctcctccttctcctagctctacctcctgctgtggctctccagattttgtatttacattctatgatggttcttcatttatataacaaagtgtgatggagaacaggaaatcttttagagaaatcaatcagggaaaatcatacaaaatggcttcattatctgggtaagtcaagctcaagctgtttataattagagtacttaactatgcttgctttagtgtcccatgagccttaggaggcagttgcaggaggctaagtgttggtgaagaccaactcttgacttccttagggataaagagggactaaattgggaggacagcagggtaggggcaagaggaagaggaaagaagagtaggaagtccatgtgaaaggcaaccgtgggtaggcttgctttttccagactggtaggaacagattccaaaccaaacatttttattttgtgagtaactggcaggctgatgcaaataaactctctcaaatgaagtgtctcctagaatccctaatgacccagccataggcagcttatgcagggtttagtgtattatccttccttcccattcaggaagctgctgaaacaccctctgcttattctcatgtatttcacagcaccagagctgagtaaatggagtggaggctaagcctcctcacattgcccctctgacgcagttgggcagcggtacgactttctattcctggataaactgtggaccccaaatatgtatttgagtagcctttacttaacacaatatgctgttgctgtaggctttgtatcctatgaatggaccatttcctagtagtgcttcaagtttgggctgtgtttccttgatcaaactcaggccatatatatttttttctttccaacttttattttaggtccaaggggtacatgtccaggtttgttacatggataaattgcatgtcacaggggtttggtatacaggttatttcatcatgcagttaataagcatagtacctgatacgtagttttgtgatattcaccctcctcccaccctccaccctcaagtagaccccagtgtctgttgttctcttctttgtgtccatatgtcctcaatgtttagctctctcttatgagtgagaacatgtggtgtttggttttcagttcctgcctaaagttgcttaggataatggcctccagatgtatccatgttgctgcaagggacatgatttcattcctttttatggctgcatggtattctgtggtgtatatgtaccacattttctttatccacttcaccattgatgggcatctaggtcaattccatgtcagatcatattttttttctatccccttcaaaagtgagaggggccagtgcatgtgaagtttggaaatgagagccaagtaggtttacatgtctcgtgaggcacaatatgattctctacttgtcatcactgtggatggactcaggatgttccagtccccttgttatcctgaggaccacagtcaaagcatgttgagaaacccaggttttagccctgcctgtgctgctggctgctggaccagcaatccttctgtcatatctcacaatatgctttgtgagttttaaagactgggagaaagaagaaaatggagttcactcatgtctttgtttgggttggtgtcacacaattccataaactgggtggcttaaaaataacagaagtttatttctcatagttgtggagcctgggaagtctaagatcggggtgctggcagatttggtgtctagtgagtgcccacttcctcatagatggtgccctctcactgtgtcctgacctggtggaaggggtgaggggtctctcttggggctcttttataagggctctaattccattcatgagggctccacctgcctgacctaatcacctcccaaaaactcacctccaaataccatcaccatgggggtgaggatttcaacataagaagtttggagggtaatgcctaggttttcttctagggtttttatggttttaggtctaacgtttaaatctttaatccatcttgaattgatttttgtataaggtgtaaggaagggatccagtttcagctttctacatatggctagccagttttcccagcaccatttattaaatagggaatcctttccccattgcttgtttttctcaggtttgtcaaagatcagatagttgtaggtatgcggcgttatttctgagggctctgttctgttccattgatctatatctctgttttggtaccagtaccatgctgttttggttactgtagccttgtagtatagtttgaagtcaggtagcgtgatgcctccggctttgttcttttggcttaggattgacttggcgatgtgggctgttttttggttccatatgaactttaaagtagttttttccaattctgtgaagaaagtcattggtagcttgatggggatggcattgaatctgtaaattaccttgggcagtatggccattttcacaatattgattcttcctacccatgagcatggaatgttcttccatttgtttgtatcctcttttatttctttgagcagtggtttgtagttctccttgaagaggtccttcacatcccttgtaagttggattcctaggtattttattctctttgaagcaattgtgaatgggagttcactcatgatttggctctctgtttgtgtgttgttggtgtataagaatgcttgtgatttttgcacattgattttgtatcctgagactttgctgaagttgcttatcagcttaaggagattttgggctgagacaatggggttttaccattcaggacataggcatgggcaaggacttcatgtccaaaacaccaaaagcaatggcaacaaaagaaaaaattgacaaatgggatctaattaaaataaagagcttctgcacagcaaaagaaactaccatcagagtgaacaggcaacctaaaaaatgggagaaaattttcccaacctactcatctgacaaagggctaatatccagaatctacaatgaactcaaacaaatttacaagaaaaaaacaaacaaccccatcaaaaagtgggcgaaggacatgaacagacacttctcaaaagaagacatttatgcagccaaaaaacacatgaaaaaatgctcatcatcactggccatcagagaaatgcaaatcaaaaccactatgagataccatctcacaccagttagaatggcaatcattaaaaagtcaggaaacaacaggtgctggagaggatgtggagaaacaggaacacttttacactgttggtgggactgtaaactagttcaaccattgtggaagtcagtgtggcgattcctcagggatctagaactagaaataccatttgacccagccatcccattactgggtatatacccaaatgactataaatcatgctgctataaagacacatgcacacgtatgtttattgcagcattattcacaatagcaaagacttggaaccaacccaaatgtccaacaatgatagactggattaagaaaatgtggcacatatacaacatggaatactatgcagccataaaaaatgatgagttcacgtcctttgtagggacatggatgaaattggaaatcatcattctcagtaatctatcgcaagaacaaaaaaccaaacaccgcatattctcactcataggtgggaattgaacaatgagatcacatggacacaggaaggggaatatcacactctggggactgttgtggggtggggggaggggggagggatagcattgggagatatacctaatgctagatgacgagttagtgggtgcagcgcaccagcacggcacatgtatacatatgtaactaacctgcacaatgtgcacatgtaccctaaaacttaaagtataattaaaaaaaaaaaaaaaagaagtttggagggacacaaacattcagtccgtagcagcccacctagcgtctaagactgtggctcaggtatattcggagctttgcttcttcccacccagtatggaagctttaggagacttgcctgctgcctgctttacctgtgtttgtcacctccccatgggcctctccttccgggtgctggctatgctggggtcttggggtctcttaccttcccttgactttgtgctgctcccttggacagtctttagtggaggggtgatgtgggaagagctacacttccctttgctctcctgtcccttaattccccagagcttcacacatacaatgactttatcaaagattaaaaagagagggagagagagaaccttaaaaatagctattctcagaagttaagagaaaaaaaaaaaacactcctaaacttttgacaggaagtcacctgagagattagctctgtgttggtgcatggcttgaggtctgtcctcctcagagtaagtgctcctctttcagtcctccacggggcaaactcccactcctgtccacagtggatccccactgccctccctactcagggagagcccattgttgttcattggggggtgttcctgaagtctgagttaatcactatggatagcatggccaggagcaccagtggggaagacgctctcctcgggggtctctgggatcctttgagcattgacccacgcttagcacacagggcatacagatctccgaggacacttgccttccagacctaccaaggagagaaatgcttttctagaaggcaacatacctgcagctgtattctctgtctgccacagaagaacagttgtctttattgtgccttgacctttcctcatctttcagcttccatgtcgtgcccaacggcttaacagtacaacagaaatgggactcagcacccagtactgtgcctctccaagcctccaggccatttggcactggccactcccactgactaggtcagacctacaggtttgcttacctggggttccatcccatccttaactggtgggatggtggccttgcagctgactaggagaaactgaaggtggtacaatggagtgaattctctaggaaacagaaggggtcagcctacttggcctgttttggctgggtcatttggtcgtttttctaaaggccaaagttcatgctcttttgaccaaagttagggatttttttttcatcaggggagttaaatgagctatttgcacttccatatttttgaaaagcggcctttcactccagcaggctcaggctgccaaattggtgtgtccccccatctgtggacaccaacatcacagccacccagagcaatggggcagatcccggtggtgactgagcagcaggttgaggctttggagacccgttttgatgtgtctttgatccctccacacgtggctgaaggcacgtgggagacagagtgtggacctcaggcctttgctgcaacatcatgagaaaaccaggactcccctgctgcctgtagctggtgggtgggtaggaggagtttacttaaaaaaaaagttagaccctagggttggggctggggtttgttcaagggctggggcaaaaggaggtgatagaaaggagggagcttgaaaattgccaagggaggaaggaagggctcagttgaacagatcagtctttttcctttaggaggggactggagaatgctccatcatggttacagaagagcttcaagggccgtgggaccttctttagccattctcaccagcagaaagccacagggaagaagaggaaaagggtgaaagaagcccagagtgataaaagggagtctctattctctcccattctttaaaaccagagcattttgagcaaaccaccattaagacacttgctttattgatttttataaatttttatttggctattttggggatggggggagacaaaaatcactgaaggaaatgttcaaagctgggaggaaaagtggttggtgacttttttcccacatttgtaaaacatcctttcacattttgtctgaatgcctattgcccgttgccaaatcctaattcaattaaaggtttagcaatgaacaccagtttagaattgttttgccatctctgctcaggacaataggcagtggaaagaagtgaagaggggggtgtcagatgccacacactgggggatatgggtgctatgggtcacctgcagccatctagctttaaaatgaccggggaagagcctcctgcattcactgtggggagaagtcaggagctgggctggcctgtgtcttcaaagtggcagctttagaaatcaggagagtctcctgggaccagctcaagctgcaataaaatgcggtgccattcatgcattaaacagatccttacagagaggctgctgctctgctaggcgttaaggacagccctctggaagacagatacagccacatctggcagctgcatggaggccagcagcccgagaccctgggtgatgatgcatcttgggcttctgccacctgctagcaccacactctgacccaaaccttcacatgggacacctggcaccaagaaggaggatagagatgtttgaatctaggaccagatacttactggattaatgacttggcctctcagagcttcaggttcctcatagactcccaccataaagtaggtatgatagcacctatcttggacggttgtaacgatagtcatctgtcatttgaccagtgctggaacatataggtatataggtgcttggaaaaaggtggctattttgaaatattctatgatttaagccctggtgtgcttaatacccccctgaaacacctaaagttgagacttcaagatgtataaaaccttccaaatagattcatgccacatttatccaccctccctctccaagcatacacatgcactgctgaatcttccagaaggggaggtcctaagggtgccaagcctgaacagatactgggaggaggactcggggcattccctccagacagttttcccaagaccctccactgccattgggaaaaagagtgtgggaaccccgggagtcttaatttaggcagccaaagggtgggccttgggagctccagctctctcagatttctggtctggcaagatggagtatgaataagaaactcagtaagcatttaactgctgattgactctgggaattcccaatagtattcgcaatagagaaggcaggtccccttcccccaaatgtcagaagccggcttcctccgcctactcctggtgacttccaccgccctgcacacatgggggcgctgcagccctacttttgctggatgccctccccgtccgagtcctgaaagaccctgattttcctctgtatctgggtgagttcacattctctgtgtcttcctatgtagaaatcagcgaaagctcagcaatgtacttagaaaataaaaccaaaaatgtgcaccttaaaccaggaaacaaaaacttacgcaagcaatgcatttttttaattgtacaaacacttaaaagtatgtgtaagcaaaaagaattccaaataccctgtgagaataatattcaaaacacacacacacacgtgcacaaacacatggaatgggacgataagggtgatttttatttatttatcaagataaggtatcattctgcaaactattttgttattagctttttcacttaaaaatagccctgcttgcaagcaggctctgtggtgcaatggatagcgcattggacttctagcctaaatcaagagattcaaaaatagccctgctaaatatttgcaatctttcctacgctcctttttcccccaaagtgactttggatatccagagttaccaaatctagtatttgaagtccttaggtttgagggttgaaagtgaaaggcaagctgttttaatgaaaattcctaactgaagagagcggagacttaagatgcttaaattttggtcacacctgagcggtatttgtttgcatggcagttagaaggcaggtaatttgtcctaaaactaaaacagcagttaacaacctttaaattccctgaggagatcccttcttccccaaccaaacctgttcccatttccttctagactggttgacggtcaggtgggctgattggttctccctgctacagtggtagaattcagcgctgtacctaggtaagaagggttttggagggtgtatgggaaggtacacacagggtagagatgatagcacaggctttgtggtcagactggcaatggttcaaatcccagctctgtgacttcttgcccaggtgggtggcctcaggcaaattacttaatcgcccagagcctcattggtaaaacagggtcataaaactctcacagaattgtgactggcagattataagcacccaatgctcttttaggggttcacaaagtttttctgcaaagagccagatagtgcatattgtaggctttgtgagccatacagtctgtatcataatgagtcaactctgccattgcatcacaaaagcagccacggacagtatgtaaataagcgagcaaggctgtgttccaataaaagtttatttacaaaaatagatggcaagctggatttgacctgtggaccatggttgactgaccctgctcgtgatcatccccatccaacagaaatatagcagaggccacagatagaatactagattttcttgtagccacactataaaaggaaagagaaacaggtgaaattagttttaagaatagattttatgcccgggcgtggtggctcacacctgtaagctcagcaccatcggaggccgaggcgggcagatcacttgaggtcaggagttccagaccagcctggccaacatggagaaaccctttctctactaaaaatacaaaaattagctgggtgtgggggctgatgcctgtactcccagctactttggagactgaggcaggagaatcgcttgaaccagggaggcggaagttgcagtgagccaagattgtgccattgcactccagcctgggtgataagagtgaaactccatctcaagaaaaaaaaaaaaaaaaagaatagattttacttacctcaatatatccaagttatgattgcttcaacatgtaactaatatgaaaaattccttaatgagatggtacattttattttttggtaatattttcaaactctgctggtattttaaacttatgacacatctcattttgcactggtcacatttcgagtggtcagtaaaacgtaacctcaatattgcttctcaaactgcaggccaaaaccaatttagtgggtcaagaaagcaacttacttaaaaaaaatcaaattttaaaaatgaaatggaggagaatagaaactatcagggtacactacatgtaggaaggacatgggtcgtttcttgtactttggtgtgtgaatgcctgtgtgtgcacgtgcctgtgtgtgggtgtgcgctgagacatcatgagaaaaagaagacatctatttcttactgtagattgcacacagacatgtttgaaactcattactgtacgtgctaaagtcaagtgggttttttgtttgtgtttttgtcttttagagcaggctaactggggtgtttagctagtgcttcacacaggctgtgctgttgaccgaataaacatccaaaaccagctaaaccagttgctaaatgtcatagtgaccatttaaaaatacaaatcaaagtttcaaactttaaactttattatctctattcttagctttaaagcatgctcattttacagatagcaaacagaaatccggaaaagtgaaatacttaagaccccaaaaccttggctgggcccagtgtctcatgcttgtaatccaacactctgggaggctgaggtgggaggatcacttgaacccaggagtttgagaccagcctgggcaatatagcaagacctggtgtctacaagaaaatttaagaacaaaaaagaggctgggcatggtagctcatgcctgtaatctcagcactttgggaggctgagatgggtggatcacctgagttcaggagttcaagaccagcctggacaacatggtgaactctgtctctactaaaaatacaaaaattagccagacatagtggctcgtgcctgtaatcccagctactccggaggctgaggcaggagaatcgcttgaacccgggaggcagaggttgcagtgagccacgatcatgccattgcactccagccagggtgacaagagtgaagctctgtctcaccaaaagaaaaataataataagaagaagaagaaggagaaggagaagaagaagaaaatactaatagttaaaaacaaaacaaaaaaaagaccaaaaacctgagaagtagttttggaacgagaatgaggaactctgtgaactcagccttgagctccttcctcacctgctgggctctctacctgggcatgtgaatgggaaactgggccaattcacccagtgatttaagcattgagtcatttttttgcttggaatatttgaatatatgaaataaaagttaaagaggtattgctttaaagcacttcattctcttattgattcttttattgactcttccacaaatattttttttccctcagtttttggtcatctacatatttaggtttttaaaaaattaaattagttttgtactcaggggtacatgtgcatgtttgttacgtgggtatattgcatactggtggggactggacttctagtgtacccgttacccaaatagtgaacatcgcatcaaataggtaattattcaaccctcactcccagccccttttggagtccccggtgtttattatttcatctctatgtccacgtgtacccagtgattagctaccacttataagtgacaacatgtgatatttggttttgtgcttctgaattagttcatttagggtaattccacctgctcatgctttctgagcatccgaaggtgtatcctgctgggaaacaaatgtgaaggaggcataggctctacatgctcacaatctggggtagggtgttatctttcaataaaaacatgtctgagtggggcatggtggctcatgcctgtaatcccagcactttgggaggccgaggcgggaggatcacttgagtccaagagtttaagaccagcctgggcaacatagggagactttgtctctataaaaaatacaaaaatttaaacaggcatggaggcacacacctgtagtcccagctacttggagattggggcaggaggatggcttgagcctgggaggtcaaggttgcagtgagctgtgatcacaccactgtactccagtctgggcaacagagtgagaccctgtgtcaaaacaaaacaaaacaaaaacaaacatgtctgagattatttcgaatgctataaaaaagagtttgtttcatctggtatgtagtgccgtaaaagatgaaaatgtgaaactgatgaaactcacttttcctccctgctctttagcaatgggatgaaagacattttaaataaatctatgactcatcgggtctttctcttttcagtaaaaattatttaaggcctattttctggaaataaattctgggtaaaccctactcccctaatgggatcccatttcttcctttccccgagggttgatacgtagaatgaacacagtctttggattcaggcagacttgggtataaattctgcctctaccacttcaagactatgaggcttaggccatgttctctaagactcagcttccccatccataaaatgagtatgataacgctgacctcataaggttgtagtaacgattagttgcaagaatatatgttaattaagaaaaaagttcaagtgtgaaaaatgcttttatatatgaatttttggtatgaataagttttcatcacatagctaattgagtctagaaatgattttgtttgtttttgtttttttttgtcacttcctcctccttccagaaaggtgcagtgggaagctgagaaaggcattttggttcccttattttaaggtcctgatgcttaatggcttaccgactgcatttttaagatattgtttccctacccattcatatctctgtcttatacatgtatggtttctgtcagtaattcaacattcacaaaaaaatggcccagacattattttaaaaaagaacaaaaaacaaataggccttgcagttgttaccatggcaaccaaatactttcctgtcatttattcagaagtgaattattaatgagctttgtctgggacatagtcagaaaacacacccgttactctccaggggaaggtaatatggcttctgtagcaagcaaggtcacagtgtggaaaagtaggggatgttcttgcctcctcatccagtgtggggaagacccaaatgagccagccatttacatgggagcctcctcagtggccagagaccccacgtttctggcattttgggattgcataaaaagctgggcccctctctgagtcacttttctagaagcagcatcttgaactggcatttcttcccccacccaccccagaatgatttgacccatttcttcttaggtaattctctcccacacattaaggcagccatcttcagtgattgattgaccaggatcaagtacatataccaattctacaggagaatgggggtgaggggaggtgccagaagatgggaaagtcagaaggtctatttttgcagattactgggtgtggtggatacctgtaatcccagcactttgggaggctgaggcaagaggattgcttgattctagaagttcaagaccagcctgggcaacatagcaagactccatctctacaacaaataaaaaagggggaaaaaagatgtaaatttttgccccttgttcttttttaaaaatgaaaaagcactgcaggttagtcaccaagcttctcagacaaggtaattttaaggaatgtatttaagctttctaagtcccagtttccatgtttgtaaaatgggtttaatagtaggaccacattatttaggggtggttgtgaggataaatgcataggaactatatgaagaagttcctgacacacattaagccccttagtatgttagctattgcttttaaaatgatttatccctaaaccatatatcaatattgcttgaaggttgaatcacctgaaatttgttatgatttcaaaatacaaccttttaaactgatgggttttttgaattttcaaaaataaaaattgatgttcttttgatttctttcaaaagaagatgcttgaaatagccatctgagtagtaacatattgatgccttttcatcggcacctttcttcagttgattgttgatgtacactgacatccctgaatttcattacagcagtgactgagggtgtcaacgtctacaggtatctggaaaccatatttattttaaatgacatctttttttttctggcacaataaaagagtgaggaatgagagaagacaagataggcctaagaatttagatattccatggaaaaaacaaacctgagagtgtgaaagaaatatagcagggaacatggttaaggttcagagaaaagaaaactgtcattatttttattttattttattttatttattttatttttttgagatggagtcttgctctgtcgcccaggctggagtgcagtggcgccatctcggctcactgcaagctccgcctcccgggttcaccccattctcctgcctcagcctcctgagtagctgggactacaggcatccgccaccatgcccggctaattttttgtattttagtagagacggggtttcaccatgttagccaggatggtctagatctcctgacctcgtgatccacccgccttggcctcctaaagtgctgggattacaggcttgagccaccgcgccgggccaactgtcattatttttaaagcttcactgtgttccttgctcctgtgtcctttgtctaaattcttctaactttgatgagccaaattctacacatagtttcacccagagaacctgcaggctcaagaaaaaaatactattataataatatatgatgatataagattggttagaagatgctaaggagaatccaagcaatcagagaaaaataaaaccaagctccctgtctttgatatagcacatcttggggaaagatcaagtcagaaaagcagatggccggcctggctcattgtggaattggtattctgagataacttacaggtcccaaaccatgtcgctgtaaggtgttctgagaaagaacatttgactgctacccagacccctctgcaggttcttctgtttagggagaatgggaggcaaaacactacaaaacctgtaggctttagaaatagacagactagctgtgtgaccttggggaaattgcctaacttctctgagcctcagtttgctcacctggtaaaagggagataatatttccctttcagggttgtgatgaggatgaaatggaaaaaccatctgatatgtgcttgtcatagattatcaacagctgttacctctcttctatgtactgaaaaagccatctgttaccctaattcataaaaaggaggggagggcagggatggtttgagcttggacattttctggcctttctcaatgacaatttagaatgcagtgaggggaaagcttttatttttgaatatttctatttcactgtctcactgggtcactctggggcctctagaaattgtattctccagatatagtatgatgttgtcagcatatgcatacatttttatcacttctttagtttatctttgtataaaccacatatatctgggaaatttaaccaactgcctttctacaagtggtgtcatatttaggcagatggttactttttgggtacacaattgtgtagggaagccatcttgcactgagactctgagaccatgggcttcccagccttagcatcttacttactgtcacctctctaggctttagaggggttgattattgggtttctaaaatccttctaaatttcccaaattctatggttcaaagtctttgtgtaactgtccaatagaacaagcatataagtggccaaacttctgtgatgatactcctttcccctaaagccagtgaatcttctgaacattcagaaattgggatactggtgaatatgccacagtggaaatgcataggtaacttcaacaagcaaataatcttcaatgatgaatcaatatcttctaatccactgagcctaaagctgcaactgtttgagattcattaaggattcttaaatctaacatgtatttgtcattttgaattatggccatatgctttgcagatggcctctgagtgggtcttccttattcaagaaggagtagggtcacattcattatttgtacattacttttttaaagattcatgggattaaaggatgaaatcagaactcagacaatccaggagcaacctgcgtggatgagaatagtcatcttccatattccacatgggatctgtactttcagttaaaatatttatataattatggtatcattaaaaaagtcatttccagatctcactgacttcgttgatgaatcacccactcaccggtttaagttacatgtgacaagacagcttctattactattttgtttcttgttcttggattccatgagatatctatacttagcaatatgatactctcctcttttatttgcactagggtgaacgtatttctctttcaagcaaccaaaaaagtcctggctggaacagaggaggcgatggcaggccattgctaaactttgctgtgttgtggcagtacagtttctgtcccttttatcttgttaactgtcagtactccaaacaagcgagtagaacaattgccatccgttcagcatgaagaaccccatggaagggatctagagggagatgtcacaccatagatgtactgagtgagatggtatcatggtggccattcctcaaaatatcagcactgccctccagaatccacccagatgacattgatcaagcatctactgtaagccagacacttggagaggtgctgggaatacagagatgagaaagacagggtatttgctcttgggtggttcattccataatgatagcaacaacttatatagaacctgttctatgccaggcattgttttaaatgcttcatgtatgttagcttgtgtgatcttcagaacaaccccatgaggtgggaactattcttaccatccctgttttatagacagggaaactgaaacacagagaatctgggtaacttgccctagttacatagctagtgaggagcagaaccagaatccaaacctaagcagtcagctccagagttgggctccccactggcacattctgcttgtactctccttttctctgataatcccatgacatctttatctccttaagccatatagcattttcttaggcttatttctttcataataaccattataaaaataacaacaacaaaaaatactttcaaccaaaaaaggcagaaaaaaggcaacacaacataacaaaattaatttacccaggtcccattactgttgtcattttagtttatgtcctttaaatttgtgtcaaactaacatagtattttcaggcatgcttttttcttttaggattatgccagagtttccccactatattcttttttgacataacttttaatacactaccagtttgagtgttttccagtcatggctacactatacaattgacttaactgatcccttactcttggacatgcctaaaattcctctgtcataacactgttgtgaacatctttgcatatgtatttttttctatatgtctgataattttcttagatggtgtaggcttttaacttttggagcgtgcaggtaggaaaagcaggatcagttttcagattcagattcaaaagaaacatttaagcttttttcactcctagagagctggaaacaataataccttaaaggtctaaagcatgatctagatcattcacctaccctttaggaggacttttttttttttttgagactgagtctcgctctgttgcccaagctggagtgcagtggcgtgatcgcagctcactgcaacctctgcctcctgggttcaagtgattctcctgcctcagcctcccatgtagctggggctacaggcacctgccaccacgcccagctaatttttgtatttttagtagagacagggtttcaccatgttggccaggctgggcttgaactcctgagctcaagtgatccacccacctcggcctcccaaagtgctgggattataggcgtgagccaccgcacccagccttaggaggaatgttaaaacttatgctttgtccttttggaaatatcatgtatcttcttcctatgaaatggattcatgatgttccattataagttagctaaacaaagatttcactggtctagttgcccctgtggcccatcttgaagaatcactctatggaatgatgggcaatcaaacacaagaggatcaggaagaaacaaaataggtttaacagaatctctgtaatagtgaaaatatcgacaggttgacaaggaccacagggaaagcacagtatgaaacaaatggtaagtaaaggtccaacaagtggtgggtgattcagtgaagagacagcaatgcagagtggttaccacgggccttgtaggaacatggagctgagtttgatttcatttcttagtttctgtgtcatcttgcacaagttgttccatttttctaagcctcagtatcttcatctgtaaaatgggcatgttatcatacctgcttcataaggttgttgtgggaatctaaccaatcatgtaagtacagatacagttactgtttgttggctttgtgcagggtactgtatttttacaatttcatcatcattttcttcattgtcacttcactcagtggaaggggactatgtgataagagatcagtactcattgttgcagaacatgaaatcatcatagttgtgtgtttctgggaaagacaataaattaaaaggtgcaatatgacacttacaagaaatacgtactcccctttgttttcctgaagtacaaagtaggatcaggttggaatttcccgcctgtcttctgaggcaaacaagagcagtttgggggcctcgctgagggggctggtgtcctctgaaccagcagggtaggcatgagtggacaggctgtggcttgtacttcagtgtccctctgatgtttttaaaaattgacagctattgaagatttttcgggctgttcttggtgggactcaaactcaaagagaaagaaggggtgatctttatgggtaaggtaactgggatgtctagggattcagcaggctttggatacagcagacagagggctgaaaggctatctagactttgctactctccccatcttttggttgggttttcttctgggttgttgtcctttcaggcaatgatgggtttggcagctcaagacttacagcatcctcagagaaaatgatttcagcaatggaaagtgcctcttttctgatacttctaggaagaggcccagagaagagtctcattggctgggcttcagccacacccattcttgggctgaccactgtaggaaaggattgctctgattgcccagtctggatcaccgtgtgatgacaatcacacgatgggatgacatggaaaaggtggctgcccaaaaagctgcccgaatgatgaaaataagagaaaagaaacaaagggatgaaaggaggaaaatatatgtggctactgcaaactcttaaaaaaatctcataattgagtaacttatacctgagctctgtaatacttcactccaacttagtttgtcaaggagttttcttttcttttccttctcttttcttctacctccatccccactacgtgtaattttgtcagatgttgtcttctattgcctgaaactttagcagtcgctgtgaatcctgtttctttaagcccagggtgtcattgggagcataacagtcatccagtgcagctcagcttctccctacagattctaaaaatacccagaggcactcaaaacaaacagcgaagcactgaggcactgcccgtgcagacacccacacactcccctctttaaactgccttagcgctgtcactatagggagaatcagcaactcacgcagcccttttatttatttattttgtttttatttatatacctctttatgcagaagagatgaggggttcctgatggaacagaattgattggaagaaagggaaagagggagacaaacagcaaaagtgtttgcactgtctttttgcagctcgctgtagacctgaactaagatgtatcgagagatcagaccaatccagggagtcgcacagattagctgggatttaaaataaaactctttaacaagagatcacctagaataactcgcacatatgcatccatgaagaggcccaaggaccacatttggagaaggttagtgctcacaatgaccagggctacaacctggcttatttttcagaagcaaagcaaaagccaaggccttttccatggaatctttaggtggagtcgaaccacccagagcatcagggtgttcttatgtcaaggaggtgtttcatttcacaggactgcagagctgagggtattggcattgcatgctgtgcatctacagtttgggaacttgcttaatgttgattgtcttatcaaaccagtgagctcttgggtttttcaaaagcaggctgagggattaaatgataaaatcagatggattatgaaaatatgagaatcatgggaattataacaggtatgaccttttatagattgcctgggacaatcaggtgtctgcttaacataatgaacctgacccggtatcagcgtgcaagtaaagtctttgcagtcggtggttaaatggagtttattaaatattgttagtgataatcatggaaaggagaatttaaaatggccatagcttctaaccaactctggggatgtctggatgacatttgttttggctgttgggattcgccacgtaagtaattgattgcccagaagttgttctcagatcaagctttcaattggccggtttatggcaggatcctgggatttaaattaaaaagtgaagccttaaggataagcataagtaagttcttgggacagaatgtgcttagcattgtttccatccataagtgagtggaggaagcctgcgtgccccggacatatgcttttcactgggaaaggcgatcaaatgtctctcttcctctctccctagactgattctcatggagagtccttggcatgttctcaagcctgaagcaaaggcttctaagctcccaaattgctaggtgatctctcccgaggaatatgtccgaggcacaggtgccatgttctttgtgggtgggagtttgcttacccaggattttatgtctggcttaaaaaaaagtctgtattgcctattgaaattgcattgtctaaatgtggcaaaggatttgcaatagttttgtgaatcagggcagtctaaaaattttattagtaataacagtagcagcagcaataacaaaggctggcatttacatagacttcctatgtgccgggcactgccctctgtgtcacaatttttctttttttttgagacagagttttgctcttgttgcccaggctagagtgcaatggcatgatctcgtctcactgcaacctccacctcccagcttcaagcgatactcctgccttagcctcctgagtagctgggattacagtcatgtcaccaccacgcctggctacttttgtatttttagtagacatggggtttctccatgttggccaggctggtctcgaactcctgacctcaggtgatccatccccctcggcctcccaaagtgctgggattacaggcatgagtcactgcgcctggccatgtgtcacaaattttaatgcatttaattcacagacaatggagcttcagacttacccctccatcttctccttccccttccatgagctacatttagccgcattggctatgcatccttgccaatctggccaggtattgccaactttaactgcatccttatagacaactattcatagagcttaactgaagagaaccacgggttatatattagtctggagacactcttgcctgtcacactcttgttgcttttgtgagcagtaagttcaaggcacaagacttatcaatccaattgagagcttcagttacaggcagacttattttttcaccctgtccttcttgtctccaatgcattggaaaggttcttaatcttatactaggtggttcttagttttcatgaaaattttcagttattcctaaagacacaaattgctgatgtgaataagggtgagcgctttcagagataaagatgctaacaaatcagtgcaggtttgtgacaattttaaactgcttcagaccagctagcatcaatattttttcttggtatttcttctgtttttgatgaacgatgtctactatgcagccacaagctaatactgctgtcttcccaggaggcagggccctggtgtcttgggtatcatcacccaaacaacgtttcagaataatcagtccctaaagtaatgctttgcaaaggcatcaagccactgtgatttgagcctgggctttaggatctgggggttctgcctttttctaaatttgcatattgcttttcccgttcagaatttggagttagtaactgtggaagggcttttgggatgggaggcagtggtggtgctgattatgtttccaagtgtaaaaccaatcagctgggtttggatttctgggagcttgtgtggttctgtatggctttattcttctggctgaaactactaaaggaacctccaagttcctgcacaatgttgcttccatttgccatgtgcaagtatttttatttatcaatggccagttagtgaaataggttgtgaatctgtgtttcttaaagaaaagccaacactgggataaagaaaaagaatgcttgcaattttctagataagctagaacatgtcagtatgtaaaatgagaaaacaaaacaaaaacgtttctttctgttcagggtctgaattatctggatttgacaaatacgacaggcaaagtcaatggaataatcagcatgaatatgcctattcaggcctatctttgcagcttactttttaggggttgttgggaggttcctttcttggtatctacttgatgattttttttcatcttgcgagtcttccttggaaatagaatgaatgaagagagcacagacctcggccatcagggatgtgtgggcttaagttctgacatagccacttagctctctggtgctggacaagttccttagcctttctgagcctcagttatctcacgaaaatagagttgatcatcatccccctttggtaacgaacagatggaatgacgggtgtagagcatctgttacacagtgcatgctctgtggcattcatctggctgacctgcagcccactctctgagttgagaacaaaccagggatgatttgacagagatagccagtccaatattggttgaaacaagaaagtttgaaaaggaaaaagatgcctacagtctcttgagacacgtggtttccattctctatcccaactttactgctgacttgctgtacatccttgggaagttgcttaacccctctgaccttcaatttcctgatctgtgagatgggaataatattaatggctccttcctcctaaggatgtagtgagcgctaaatgagttaatggggatagagtgtttacgtcagtgccccgcacattggaaggggggacatacacctatttctgctttaccattctgcctgtcagccattctgatcttcatgaagacacttggcctgctcattcctcagtggttatagtaccagctgcatttctggaagctcactgctggctacaaaatgaccttcaacctccaagtgatccaggcttttcctagcagcttccatcaatgtgcaggggttgaggaaatttgtcgaatagcgacattgaggatatgagtcaaagagagggggagatgatagattcatatcttgaagcatgtggaagtaatctggtttttgtttttgcttttttttctgaagcagatccaggtgtctaaatgtaaccattgccggcttaaaaaaaattattattcacaattgaaaacagatataatgttaaatcaagatgagtaattattcacatacataagtggaaacaggataatttggttacaattataaagataaacatgttggtttttaacccaagaatggcagtggctttgatccttttttcatttacattttttgtcttttgaaaatttttaaaaatttcagacaattttagacttatagaagaattggaaaaataatacatagagttcccacattctcctccctcagcttcctttaatggtatcgtacgtattacataaccatagagcattgatcgaaactaagaaattaactttgcaacaattgctagaatttacttggatttcatatttttccagtaatgttctctctctgttctaggatccaatccaggtcctgcactgcatttagttgtcatgtctctgtagcttcctcccatctgagatagttcctcggtctttccatgtcttttcatgatcttgacactttcaaagagggtttttttttttttaatagaatacctctcaatctgggattgtctaatattttctccatttctagcttttaattgactgcactaaacatactttactgtttaggccaaggatccagtgacaaataggagtttttaagcctaatagattgtctagatatttctgagactagcctggctggttattactgatactggaggttaggagtatggactgtggagccagacagcctggattccgcttctggctctgtgacttacctgctgtgtgactttgcaaatgttacttgacttctctgtgccttgatgtcctagtctaccaattggggataataatagaatcaattcttagggtcacggtgaagatcaagtagaagtatgaagtgtgtagaacagtttttcacaggtggtgatcactcagtctgtcttagcttttaccattgctcaccctcctctgtagccctcctcatcccagtccaggcccagtgacctgctgatgccactgcccgggtctgcaagtacttgtgtggctctgaccagagtgacgactttgcagcaaggacctggggtttttagacatggttctcgtggcccaactgaaatagccaccttgactggagggcccaaagcttggatgctactaccacacgggggttccatctccagggcctcctgctgtgctcagctcaccagccacccacatcctgcaacctgcacctgcagtcgtgagatctactcagaaatggccccaggcccgcttcttctactctgctttactgaccactttgttctgggggtttttgtcctctcacctgtgtctcctctcttccccttgttcctctgaattcacgtgaagcggggaaccacaatgataacacattcagcttctctggaaggactgactgggtttgcttctcagccataattcaacttcaatctgggcttcaatgtcttggtatctaaaagaggatgatcgtagtaataataagtatcattaaatgtaatgaggttttattctctgcagggcactactttattatttttattttttattttttgttatacaatttttatctgaaaaatccatgttacacaaatagtcatacagtaagtcctcacttaatgtgtaaaataggttcttgaaaactgcggtttttaaaaagtgaaacaatgttgctatatgccattcaaataccttttgtttgtatcaattaaactatggtaaaatttgttttcttaagcaatatgttgcttcacttacagttacagcttccaagaacctgtcaacattaagaactgactatacacatgtacgatttatataggtatgtgtatgtgtatcaccttacacatttatatatatagatatatcttaatgacacagtgccagcaggctccctactaagtataagacaaaattataagataatagttattaaaaaataatagatggcttaatatttgcttagcaatgttctaagctcattaatgacacaggacatttaaaaaatctagaaggtgagtagatacttttaaccagtggtgtccaaccaaccctttgaatgagaggacttttttgcttatctgtggtacaaatatcatgaaaactatacacaaaccctttttctttttagctcatcagctatcattagtgttagtgtattttatgtgtggcccaagacaatgtttcttcttccaatatggccggggaagtcaaaaggttggacactcgttctttaaatttggggtttggctactgtctcatctatcttcaaattgtaggtctcttttctttgctccagacaggtgaccagatctagggaggccaggtctctgtaattctccaacaacacatcgctatttaaattctgctgggcagggtccaggcatttccactcttctggagagaattctgtggccacatccctgaatgttaagagttccatttctcagcttcgggagtgtcttggagtcttagctataaatcattcaaagccagcaagtcacagagcgagggaggctgtggtagaatcacctaggcatcccagagcagaggacacagggcagtgaagccctaacctgcagggcactactttaaatgtcacctctattattttatttaatcttcatcacaaatgtatgacatatctactaacataatcccacttcacagatgaggaagctgagaaacacagagtttaagtaacttgctcaagatcacacagctaagacacggaggagtcagcattcaaactcaacctggctttggagccgacgttcttaggtactacatgtgagggttaaataaggtaatctgcatggagtacttagcaaagtgcctggctcagagttaatactttgaacttgagctatattaatcccatgatctgatttctgtttcctctgcctcctggtgtatatgactctgggatgctgtgttaatcattgacccagtgctctgtatcatggcaatggctccttgcccagttctcagacaagtatgccccttgcccatgctgcattagccctaccacttcctgcccagcagatggggcacccacagcccctcaccttgttgcagcacagcctgcagccctctccctgtttcacatctactcattttctggggtctttcctgcgttcccacttagtttcaccttgtacctcaacctttgtttctgcttctctcacccttgtttctaccttctgctctcacccacagcctgacctcagcccctccctagaccagctgctccccagccctttgcttggttcctgggacctgttgtttggcacagtctaggggcagaagatcatgactggcatccctaccgggtttgtcccattcatgagggggcccaacctggctatggaaacagcagcacttggtcatgggtcttgaggtctgaaagaaggtgttgaatggagaaaggagctgaaagggcagctgctcctgcagaagggacagtgagcaggagcaggggtggccaccatctcacacgcccttgcctcttcctgtgactgggccctgctcctccaggctttatcaagtcaccatctctgagagaaggtgccccagtgccccacacatggctcatgccctgctctggtgtgtcgtgcttctgaaatgtggatccctgggttgtacataggcctgaatctctgatcatgctgtgagcagtgggcagaagccagatgccccagccaggctgcctgggcttgcatcccaaactaccatgtgctaaacaagttcgagcaagttacccaaatcctctgtgcctcagtttccccacctgtaaaatgaagatccttaaaaataccaacctcacaaacttattttaaggattaaatgaattaatctaaatgaagggcttagaatggttcctggtgaaaaatagttattgattataattctaagagttattgattataattacaagaattattgattttaatcattggttgtagattcttactttgagttattgattacaatttattattgtctataagtgctattgattataattataacctactgtaattaccttgatgataattattgctacaataataagttattgattataattcttactatgactgggaacttcttgaggccacccaaagcaccatactcatatttgtggctggtcctttgctaggtccttcctggttattgagaataagtttgcaataatcacctgtgaaactgaggataaatatctcaaataaattgtatggagtgtgtacttgagagatactaaaataacaggaaaagctaataatctagctttgggagttgtcatgtggctaaatgcccagtccccagagccaccaaagcaggggagaggggaccaatacacatggtgacaccataagatagcatagcagaatgaagccatcacctgggtggcgtgatttgttgatgaaggctctgtaagtgaggagggtctggtccagctgaaaaatgagtgaaagatgcatctgatcctaagagacaagagaggccaaggggcagccttgtagtttctctttaccaggcatacttccttcccttgccctctccatcccttctctactttctctccaagtcacctctttgtttactcccttctgtcctacattgcaccccttttggtagttgcagacagtggtgaaggcaccatgactgatgggggagccagctgctgggccagaccccaaggcttcttcatgcattgtccaggagtattagtggctccagaactctcaggctactatcattttgttttgcatttgcttttccaactgaaacaattttagacctgtagcctggttgagtgaatttcaagatcaggtagaatagtgcttcttactgaaactctcatgtgtttaagaatcacctaggattctgatggaaatgtggtttctcattctgcaggtctggttggggcctggggttctgcatttgtatggggctcctaggtgaagtggatggttgcttgggtgcactctgagtagcaagaagtcagcctgttaattcagctaattgtacttctgactgttcagcaaagaaacaaaactgtgaaagtctctcaagtatcgttgcagatgttgcctactcctaaaaacattaaatgaggtcacagagtctccctttgcaaagatctcaaggcatcatgggtgtgttcccacccctggtggtactaagggaaacgaagtcacaggttcaggtttcaattctcaggggacccatcagcttcactttgctccactgttgtagactgcccagtggccattggtcaccaaagtcattgtagttgacagatggtggcagggagatgaagagtgagaacaatcagtaaaacctgagagaggaggttctgagggtccagctggaccatggtggatacttgcctatgtcactaggaagggagggaatgtggattggagccaagttggtgctgtatcaaagtcatgagggaagctcataaacaagaggcaaatgaaacaatgggaaacaaggaaatggggcttgcattcagagtttcaacagtgggtgagacaaagtaggttgctttaggatgaatgaggcaaagggttctcactgagggtagccacctggcctacaggtgctggaccaaagtgaacacagatgagtcaactccacccattgtctctgcaagaaaacagctcaaaactcaccccatgaatgagagaggaagatgccaccctttgggactgtctgtaccctggcagaaatggaatgatttatccaaataagcaaggcaagttttcatatatttcatgtattcttgcatatatcttagccatcttttcttttcctgggccactcagcatgtgcagctcatgttcttcttggcctgggaggtcatggaaattctacctggctgctgcaatgctggggagggatactcagcaatggggatttcactttctgccatccagttcttctttcagacactgcctccagtgagacagcctctcacataagatggaaagatgcacctgctctcattccccgcactgagccctcctctctgctcttagctctgggtgggagctgctctctacctctcatgaaaccagagtacaccttataacactcactctgttctttgggcttctcctccaacccatatgtaccctctgtcaggctgctgagtatttgctaagaccccagtcttcttttctcttggtgaggcacagttgcccaaagtcaccactgtccttgttcacttgagagctgaagtaacttaggtagttatttcagaagagataatttgactccttctttgaggaggcttagcccggcactgacaatgtgccaccactaaaggtacctaggaagaggtggaggaatattctgtggccactcctgcctcatcactttccctaaagagagtgagctctggaatcacataaacctagccccagttcttagaggatcacatgcttgaccttcagcaaggccaagcctgtttcctcaactgaagaatggggcaagtaacactgtatttccacatcaaggtgttgtgcaggttaaattggatgctgtgtataaagcccttgcctggctgatggtttaagtgcattataagtattaacaattattgttactgacaactgtgctacagcctattggagggtcacgtatacttttcccttcatgcctttgcccacactgttctgcctgaatcatcctccctcttcacccccacccaattttgtgagtctggtaagttttactttaccttatcccaaattcttgatttctgacaaccagatactttattcctatatggactgtttcttacttgactggctagggatccttatattatgatttttgttagcattagttatatatttgagttactgccatgctatcctgccccagctcctgcctgaatacatacaccttgtcatctgggctgacgatgatgatcagttcttagagggcaaggtcagctttgtgtcacttgcaaggcagagcttaagaggcagtcaataaaaattcagaataaatgtattgaatcttgaagtagaaattctaagttctttttagggatgtgtatgtggctgtgtcattctctggtaggtgtgacgatctcatgtgtgggacaatgctttggtaagcatcaacaaaatgtcagaccatttagcttctttatccccaaggccccatggctttttatttccaacctccagcatgagtttccattcattctttacatattttgttttgcttcagctggggagtgggagagagcctcaaggcatctggtaaggaacctggagcttggtaagctgattctagtatgaggatggaaacctacaacacaatcagagctcatgagtgatgctgaaatataacttgtaatttttatactgaaagtgttcaatctctcaccttccctcacctcgagttacatgacaaaaggccctctttattacttttgtctctagagcccccagtctctgggaaggtggtgggggaaaaagtctattctgggatgtgttatttttgctgcccacatattatccactccagagcaggacttgatgttttaaaaccagggagaagcctcgggaagggaaagcaagcagcatatgtagtatgagctctcccagacttgtgtttttctataatgttaaagtcttctctctaggcagtgatttgaagtggagcttaattaaaatcaggcaagaagtgtagaaatggaacattaaaaatagaaaggtacaggaatggcactgtccatcccacccctgtcataatgtcagtggcagggctctgcacttcattttgcttctccaagtggtgctagacaagacctctgtcctcatctgctttcctacacaaaatggcatatcccagggtaagctggcatgctttgggggccaaagacgtgtcagggacatcatggctgggcctgaatctaccccagctgatagcttatgtgtatgcaccattgttctctgtatttcagtgtaaggcagctaagcaagcctgcagagctaggaaaaataaaacaggacaacagtaaacatctctgacttaaaatattcatgacaacccttgctgctttttagaacagttgtttagtagagtgggaaaagcaaggctacgtgagcttgatagattactcaactggaccttactttctttatgtgtagaatggatatcaaaatgcctaccatatagatttgatgataatcaataataatgtcagccataattgattgagcatgactgcaggccaagcattttttgaaagtctttaggaggtagggactatgattatccccattttgcagaccaggaaagagaagctcagggaggtttagtgacttttccaaaatcacacagctaggaagtggtaaagcaggactcagacctgcagctgacaagctgtaaattctgtgttgtcagtagctcaaccatacctgagtaaagatccagggaaatcatatagctttactcaaagtgtgaaatgaatgttctgatgaattgaaagatgattttagggggcacatgagatgattgggggtgcattgatgagggattaagttatgtcctatcatggggtgagaaaattattcctttttaaattctttttcaatctttctgagtatgacaaggattaaactttgattaggtggtgctgtgccttcaacaccgtctaatactttttaacctccatttttaacaaacagagcagatagcagaggcttagcagacaataatatctagctagaattcagtaaaaaatggttttatgtcatattcattttcacttccaccctctatttatggcaggtgatactggatttttattgatggtagtgatctaaaattttgtcttagaatacacttactggagtacaaagaatcagtcagtgttcaacactattacagaaataatactagaggtggcgttcacatagggcaaaaatagcagaggctgaacatgaatgactcaagcatgagaaatgctgtgatagcctgtgagcagttttcagctgatggtagcacgtggatcataataaacgtcaaggacagagtgaaggaaaaatgtaactctctcttctgatctcttaataggagaaaagaaatgagctgcttatgaactagatgaaacagtcttctgacattttgggtatgaatttagcctgttctgaaggctgatgggtaaagcaggggttcgggaaaatggagtttgctttggtcttcattgaaccatagaagctgagtgctggggacggaacttaagctcaggatcagatcctgtgttagacacatgagggtccagatgcagaaggcatttcccccaaggtcaccctggctgagagcaactgcagtgtgaataattatttcatccatttctgggtcaagttcctcatcttgagtctctttttcccacaacagccaccaggcatgaactggcccatggtaaaacccagatagctcagggtcaaatctaccagttattgtaggtgctcaccaatgccctggcactgcacaaagcaccatgcattacaaagaaactccacaaagagaaggaagtaaacaactgtctccaaactcaaggagatgacagggttatgctatatgatttttacccttagatgagtatcatttgggaggtaagtagcaagtctgctatgatagagtcagttaggaaggtcctcccaggagtgagaagccctgtattagtcagctttgaccaggttctgcttcaataacaaccactcccatgtttcagtgatttccaacaacaaaatttgattttgtgtctgttacacattggttgcagggcaactgcatgcatttactgtaccttcttcacctaggacccgggctgaagcagcagccagggccacacctctcttaaaccagaggggaaaagagcaatagcagaaccatggggaacttcctaatgcttctacttggaagtggcatgtgttacttctgttttgtgttggtttgggttcctaggagcagattttacaacacggcttcaaactcatacagattattagggagatataggaaacatcaatcagggaatggagaaatgagacaaggaaggcagtcaggagaacatgtgttatcaagctagctaccactgtggacaactccagttcagtcccatggagaaattctggaaaacagggcaaatcatgtgccttagaattaccctcctgaggaacaagggagctggtatatttacacaaccaaaccttccagacatgggttgaaggctactcctgaggagttttaatttcctagcacttccagcccgtgtgtacacacagagagtagccttctagcttccgagaaagcactcagacaaagagatagatgctagcagttacaagttggctggagtgcattagagggacagagaggagggacgtgagtggggcactgagagcatctgagacatgctcacatttctttatccaaaggaattcacgtggcaaaggacgtcttcagggatagagaagtgtaatcctcccacagaggtgcagcaatacttgagaaccaaaacaggccctgaaccctgattcataagtataataaactctagttgacacagtacatgtaatagatggttaactgagagctaccatccagaccagggtgttttgacctcagcactattgacatttggggctggctaattctttgccgtggaggactgttttatgcattatagcatgtttagcagcattcctgtcctctacccacttggtgcccatagcctccctcccctcacctcataattgtgacaaccaaacatgtctccaggtgttgccacgtgttcctaggggaaaagtcacccctgtagagagccactgatgtagaccatatatgcattgctaattcccaaggaactgaaataaattgtggatgcctcgatggaggtgtgcacagcctgatgggagagacagacagacagacatataaactgtaatggccagtccaccctgggtaacaacaatttgaattatgtaaagaaaacagaaatagttcaggagtggtaaacatcacttttgttgcaggctggggatggtcagggaagtctgcagagacagagacagcagagcggggttttaaaggatgaagaggagtttttcggatgagtgatcccacatgtagaagttaatgtttctgcttgaaaatggcatgtgttactttggttctgtgttggtttgggttcctaggagcagattttacgacaaggattcaaactcacaccgtttatgatctttggtgattgtggagacttgggaatgctacactgagactgatgctggaaatgctgacctcagagccaggctgatggcagggctgtagttacaccagctttaccatatcattgatcatgtgtaaggagcaatgtcaagggctttggaggcacttagaggagttgcccaaatggcatggatacaacccagccccagagggaccagaagcacctttgctgtattattttagtcaagggagaaagccagcttattcctcggcctcctcagtatcatctcctgacccatccactttgatgtttgtcccatgtgttgtgcaaacaaaactggatgtggatttgtcacttaacatctctctgcctcagtttcttgacctgttaaacagagatcataaggttttctctcttgctagtttcacagtcttactctaaaacgcattggctgtgcgttcagatgaacctgccctgctctgccatccaccaggtatggacttctttttctccattttctcatctgtaatatgggcttaatacccacctcacagggttgtcttgaggactgaattgtgtgatgtctataagccctcagccctgcacctggcacacacagtaagagaataaatgaccataaatattaagaaataggttgagtgtgcataatgatagctaacttgtattgagtgcaggtgatgttccaggcaccatcatgggggtgtgtatgtattaacctatgactacaataggtatcctgattatctccattttacatatgaagaaactaaggctcagggaaatctgatcacttacctaatgtgtgtagttagtgagtggtattcaaacttcagcagactgttgagcaagtaattgctttgctggattgtttagtgcttggcattttaccatagctctttgaaaagaaaatcaagtctttaggtagatagttacattcaccaaatgattagagccagtgtagctactactgggtaaatgaacttttcttactattgactgaggcccctttagtacacttacagaatattaataagaaagtaggtgagaagaaatgtatttttaatcacagtatctgagctggcttctcagtgtgagtctacatgggtagatgatgaatcaccccaaactgaccctttccagaaatgccttgtgagggcagcacaaaggaaaactttccattgcttaactctccccacagcccccaccctcagctattgaaataaaatgccaagaggctgcttgccagctcctggacaccacctccagaacagcagggagtgtcttctctccctttgtggcagggacacatatggtgttcttagtgtcagagcaagcagactctgttccaagagctgcttttcaatccagcctctgtgcatgggatggcagcaatggaaaacagtgcagggtcctgggtctgagggtcatcctctttctgccggtgcccctgccacctgctaagctcttgtctttggtggaacaggaaataccactcagtgcaggtacagacctagcctgccttgtacacctccgtgtcctggtcctttgtagatgcttgaatgagaaccaatcagtgaggaaaaggtatgatgcccctcctgttcaaaacacctattgagtaccaagtactacacccagatatcattttcttccttctttctttggctcaggtcctagctccagaccttgtcagccacgtgtcctggagcaagttattttctctctctttgcctcatcaagaagatggacataataataattccgtgcagagagttgctggaagaactcagtataaagcaactggctgacagaaagtgctctaagtgctagttcctctgtcattttgagaccaagccagatgtgttagagatgtccctgggggaacttgtatcctggaatttgacagcctggagagatctgaaggcattctctggtcctgtaccccaaatgaggtttgaaaccctccaatgagctccctattttgtaagttacaaaacctttggcaaccgagaagaggcatctgtagcaactttagctgtgtcccaagctccaagccatccgcccttccttccccactaccaggcaacagcctgctgtctgcctcctactcagacatccacggtctggaacaaccccaaaattgtcatctggggcagaatacacaacacccaaaagatggttttgctttctgaacctcacctgcagccactcctggcttctccacttcccatcctttatgacattcatgctgcacacctccccttctctagagagacagtaagcctctccagtgagaggcagggtgtgcaatagtaacatgcattggctcaggagtccgactttgagggtctgccgctgacctgctttgtgaacttcagcaagttgctcagtctctctgtgccttcttcttgtccccaataggaataatagtagtgctacctcatcaggtttttgaaagattcaaacaagccaaatgtgaagcatttagaatgtggctggcacatagtaagtcttcagtgaagattagctagtatcattgtcctaaagtgataaatgtcaccaaaagggggagtagatgctgcaactagaagttggatgtagtcaggctgctaagacatgagacctgaaaatccagtttgctgtggatttgccatggattcccatggcgactctcaaaagcaaagttgctcaaaggccatttaaggctcataaagtcaatggttgttttgcctaagaaatttttgtggaatgaacaaatacaacatagtaaggataatcataatagttaccatatgttgcatgccacattccaggcactttcacatgtattgatggaattaattttcactacagtcccgtgaatagttattattattatcatctgttgtatgaatgaagtatttgaggttcacagatgttagataatctgtccaaggccacacagctcatgagtgttgaaagtaggattggaatctcaggtggtgctccaaaagatgtccactgcaggccacaggattctttattttaacatatttatctatggctgctattaggaaccaactgaagaacagtcctctctcagatgttatatctcctgtgaaaatttcagattgggattgaaatggcccagggaggggccagagacagctatgaaagagccacagatatggtgaggagtgtgtctagatgatccagacacctgcggggattgtgcagagcagagctctgcatcaggccacatgcaaaacatcttgggcatctgctgtctggggtagatggtagtttggagagtcccctggcccgatctccaccattgcctataccaggtgagaactgaagctccattctctgtgctaacctctggtcagattaataattctatatagcagcctgaatcctaccaatatgatgacaaaagtctttaattatttatttatttttgagacagggtctcactgtgtctatcacctaggctagagtgcagtggtgtgaacgtggctcactgcagcctcaacctcccaggctcaagtgatcctctacttcagcccttggagtagctgagactgcaggcaggcatcaccatgcccagttaatttttgtatttttgtggaagacttggttttgccatgttgtccagggtggtcttgaactcctaggctcaaggagtcctcctgcctaggcctcccaaagtgctgagattacaggtgtgagccaccgtacccagctgacaaaagcctttattcctttctaccctaagactaaatccaactctgtggcttagactcagagtcctctgtgttctcacccatttgtcccctcttcttaacctaaaggattgccatgatatgggagattttgatgcctgacaaggggtgggggaagcagaaaggaggagcgagtaacaaaggccttctccagaagtgagggaggccagcctggacacagagggcctgtgtgctatgttagggagcttgatctttatatagaagactattgcttcagagtatgttccttggatcaataaatccatacatctatatagttcttacataagaaaaataaaacaaacaaaaagttaacatgttctgggtaactttgggtatggcttggttaagcaaagttgaatgtttcttcactgcagaatttctcagagcctttaataaactaatgtacattcttagcctccaaaagtgggcagctctgtcaaatctgatttgacccccatcatcttaaaatgcaggagcaggccagtcatggtggctcatgcctataatcccagcattttgcgaggctgaggcaggtgaatcacttgaggtcaggagtttgagaccaccctggccaacatggtgaaaccccatctctactaaacatacaaaaattagttgggcatgctggtgggcacctgtagtcccagctactcaggaggctgagacaggaaaatcacttgagcccgggaggtggacgttgcagtgggccgagattgcaccactgtactccagcgtgggcaacagaatgagactctttctcaaaaaaaaaataataataaataaataaacaaaataaatgcaggaacattttaggtgattagtgttctgagaggcacatctgagaaatggtgttatggtttatggaagccatggaaggtgacatggagactagagtccaaacctacctcaaaacaacagcttgacctttcattttacatttaattagaaaacaaagagaggtccttccacaaaatccaggagtaaattaagctatggaacatttagaatttaagcatcaagaaaagatcagaagctggggcatctctgggccttaaaatgagctagtttcttctacactgggatttagaagttaaagactaatgactttactgggtcagggttaaatgtcaaagagcaagtcttccaaggatgaaatggttaatggtcactggggttggaagggtggtgttagagaagtgaaggtaggcacccagggaaggtcatctggtgtcagagctactgacaggctcaggggcttacccacaggctgctgggataaccaagtagaaattcacaaaacgtgggagggaaacagccatggttcttgcctaaggagagaaaagggacatcaaaggccaaagatgacactgatgatgactttaactcccataattacacaatgtccaaacaaacagtgaccttgggctctcgaaccaaatgacaaaagtcagtaggacagtttgtgacgtctttgtcatcaaaacactgggtaggtaaactttaaagcccccgacagcttttcctctatagtatagcaggactgtgatggaaggcacagctcactccagcactacgtgaccagcacgttcctggagccgagagaatggtcaggtcagaaatcttggatgggttaagggtgggttgtgaggggtgatgagaagggaggaatcagtttgcattcctggagagggaggagaaatgaaaaggcagaaaaataggttattataagacactcatgagagcctattttggtatttggcaaagacacttgcttttcccaggggctgaaataatgtgatttcgctcctgtgaatgagatcttccttaggaacattgaggctcagagaaaggagtaagagttgggaaatataatctgattttcaggaaaaacaattggtttctgaaacatcttaggatgctgaataaaatgcacaggtctctgcatgccagtgcctggcagtgagccaagtacttggtacgctgaatgaattaatgaattaatggaagaaccagagttatttttatctttccacatcaaattattccccttgaaatgactgcttaaataatatattaattacatgatactgatgatgactttactctcatgattacacaacatccaaacaaacagtgaccttgggctcctgagccaaatgacagcagtcgataggacagtttttgatgtctttgaggtcaaaacactggctaggaaaactttaaagcagctgacagctttttctctgcagtatagcaggtaagtggtgacttggaaaagctgtatttttttaaatcaaaatcatcatccatgattggatcttgaagaattgaagaacccaaaagtgtgtgacgcagtccttaatgaatatgtcctctactttcagcctcatgttctttctacaggttctaatgttagtgtcttcagccatcactgtgaagaaattgacacaaatgaaaattcatgaattgcagctctgccatttccctgttgtgtgatagctgtatttccactagcaagtgcaagtggctttaactaagattttattgtcaagcagtttaccctgctgtcaaagtcttgggtccaaagatctaaagtaaaagtgtcagcgatgttgcactgctgcctgtatttggtgggaaaattagcaggtctggcttttgtggtgaaaaaggtattttttaatagtactaaaggcataagatatttggtcccatgttattctctgggtccttgttaagtatttctctttcctcttgcaacgtagagtgtgggtgtgacaatgaccaccgcctcccgcttgctattcatttattccttcaaattactctttctttttttccattattggaaaaaatggctagtacttatttattctctcaacacattattcagtgttcactaggttctgggtgcagctttagggtttaccagaagtgggacaatattcagtactctgttctttcacatgttagtttctcttttcagaagtccaagatgatgataaaaaaataaaataaagaagtcaaatgaaacagaaattgcaaatagcagttactcaggaaaccagaaaacattgagaaagtctggaaaaattggatttgagcaagggctttctgtatttgcttggcagtgtggatgatacaaagttgtgaagaacctggtaattttccttgctacaataatataaattacttattctgttcacattttggcctatttctcctgtttaaaatgaattccttgaagttcatttgtttatagtttcagcttttaaaaacatgattaatattatgatcataaaagttctacatgctcattgcagagcagtattaaaacatataaatgtatgcataagggaaaaaaatcacctgcaatttcttcaactagagataatcactgttgaaatgttgtattccccttctagtcataacatacatcaatactatttgagatcatgttacatactttatatctgttttctaggcttcccccacctccctttttttttttagacggagtcttgctctgttgccaggctggagtacagtgacacaatctcgactcactgtaacctttgcctcttgggtttgagcgattctactgccttagcctcccaagtagctggggctatagccacctgccaccacacccagctaatttttgtatttttggtagagacggggttttaccacgttggccaggatggtctcaatctcttgacctggtgatctgcacaccttggcctcccaaaccgctgggattacaggcatgagccatggcacactgcctttcccccctttttttaaagaaaaagaacttaaaccattttaatatactataaaattcttattttaaattcttttctagccttggttgttgtcctaatggtcactcttatattgtgtggacaatatgtaggacctgactatgctcagctttatgtacatgcagtaggttgccatatgagaatatgggtaaggaattctgtcttttaatggctctgttatacttcactattgctgtggtgtcatttgtttaactattttgcaggaattggacttgattgtttccagttttcttattttataagtggtgttgcaaatgaccatctttgtattgcatttattttacttagagattgttccatgcaccatattcccaaaatgaagttacgaggttcatgaacataaacagatttataatgctttttacccattttgagaaagattaagcctgattaatactgctctcatgttgtccgaatgtacttgtttgcacaaagccccactcctgtctaatttaagtcattgatttagattttctgcctttaatagagatctaaaattaatggatttgaatttgcttttaaaaactcttactttttttttttttttttgatatagagtctcgctcagttgcccaggctggagtgcagtggcacgatctcgactcactacaacctctgcctgctgggttcaagcaattctcctgcctcagcctccctagtaactgggtttacagacatgtgccaccatgtccagctaattttttttttcttttttcttttgtagttttaacagagacggggttttaccatgttagataggatggtctcgatctcctgacctcatgatctgcccgcctcgacctcccagcgtgctgggattacaggcgtgagccaccatgcccagcctaaaagatcttacttttttataataagagatacaatgcttgccataaaaatgagcaaattaaatgagtaaaaagttaattattgcctgaaataacaatacttaaataatgtgttatcagaaaattagttttacatttttatgtaataaaatttacataaagactttatatttgaaagaataaggattacttttattctcattttccccatttttcttaatattctctctaaattgtcagagattttacatttgtcaatgccattcacctgcttagtctgtttcaagacaagcgtaaacgacaagagcaaaggaatattctagaccctcagaagaaatttcaaatgtctgagaaggatccttgaattttgctgccccagagaaaagatacgttatattcttgatcaaaagtaggtgtcttggaatgcaccgcatttttgcccacattgcaaccaagggccttctgcccagggttccaggggagtgctgggagttgccttgagtcttagccacctgaccaagtgcactgccataacgcatggccagaggtgcccaggaacattagcagatttttgactaagcctttctactatctcgggacaccaatgaggtcaaggatcttattcccagaaattttatagaacaaacacacacctgcccataacatcactgttcaaaatcaattagggatattgtatgggtcgattataagtttgtgaggatgaatttggaaaaaaacatcatggggtcccccagtctaggtgtatttgatggtattcaattcattcaggaactctcaaagtgtagctaagtacaaagttatagaatctttagaatcattactgctagacatcctacaacctgctcagaaggccacaccaactttcatgggcagttggccatgcaccatgtatttcacataattattttgtttgtaactaaagagaaacagctctgtaatggacagtgttgttatccatctgctgtgccttacatatgagaaaaccaaggctcagagttacctaacttgttcaaggagaccatcagctaagatttttttttttttttttttgagatgagatggagtcttgctctgttgcctaggttggagtgcagtggcatgatcttgactcactgcaacctctgcttcccaggttcaagtgattctcctgcctcagcctcccgagtagctgggattacaggcacatgccactatgcccagctaatttttgtatttttagtagaggtggggtttcaccatgttgactaggctggtcttgaactcctgacctcaagtgatccgcctacctcagtctcccaaagtgctgggattacaggtgtgagacaccacgcccaaccaactaagatgttaagactggatctataactggcctcactccctctacagctggtgcattgaccacttcctgctgttttgtgcagacacgcagcaaaacaaggcagtcagcaggcacaacccatggatgctttttttcccagtgaactccagtacacttacaagtgctaatcatctgaaatggtgcgaattatggaaaaacacagaaaaaaagccatcaaagattattggagtgaagatgcagtaggagggtgtgaagggttgggaggagggaagtcaggtctctctgatgctgagattctgaaagtgagctcaccatggttggtctcattcacagaccgtcttacctttggccttttttcatcctgagagtaaactctataatgttttaagtctctctaccaacaaggtagaagagtttgaactcacattggccaaaggggcctgccacaagggaaaaattctttgaaaccaagcaaatttttacatcatgctctattgtttgtttgtatttctatgtaaatgttatggtttaaactaccatgtttctctgattataaacgtaatcatttataggagtttccattgattttataacagcattgggataagggaaactacattcattatgagacacattccattttcagaaaacttaaaatatgggaaaatgtataattagaacggaggaaattcaggaagattttgctgttcgtggaagatgtgtcatgtttctgttggggctaggccaggcttctggtatctatttgtgtccacatgagagtaggcacgtatttcagtatgtggtgcaaagtctcagatgtgttcttgggtgacagggatgcgggcggttgggggtaaaaagtgtaaggaattgcccatggctggctccttctgcctccctgacatctgttgggatagggtttctcgacctcggccctattggcatttgggtcaaaataattctttgttttggggggtgatttgcagcaaaaccaaaaatgtgtccagacattacaaaattgcccctggctgagaaccactgtgttagggcaaaagagaaacgttggaagaggtgggccaacacagatcctttgatttcaggattttttatttattttatttatttatttagttagttttaagaaacatagtcttgcgttgtcacataggctgggtacagtagtgtaatcgtagcccactgcagcctggaactcctaggcttcaaggaatccctccacctcagacttcctggtagtggggactccaggtgtgcaccatcatgcctggctaatttaaaaaaaaattttttttttgtagacacggggtcttgttatattgaccaggctggtctcaaactcctggtcccaaccaatcctctctcctcagcctccaaaagccctgggattacagacaggagccactgcacccagctaagactttctttttatatcagaaggcctcttgtcccagtatgccactaataggatacctttgccatttggtaatagatttgtgttttggtcttctatctgtataacgatcagacccaagggtttctagggactcttctaggcatgaaacttttctcagtagttgccaggattataggatttttaaccagtggtaccattctaacagtgctgtctgttgaaatcctccctccttaaagtttaaatgtatattaatattgcactaagtcctatgatcatactctttattcacttaacatcctttcaagggaggctttggcctgtaattgaaataggagtaaggagtcactgggagccagcggggcaaaagcacaataataataaatgcctaaatactatttaacatgcaattaattaaatatcaacatggtctgttgatggtagaaaggtgacaagactttcttcttttctgaaggtctagctcatgtccacccttgctattagggatatttgccaaggatcattgaaagaaattttgatcatctgaggtgggaattaatcatttgtcttcgagctctctattagagactcacatattttaatgtagctaaaatttattggaaaccctattgtgctcttaataggtgatttagcagtgaggaaacaagttccaattctgttctcaagaagggtacagtctagtgggggatgatgcacatccatcaatcacacagatcaacagggagttagactttttcagttaggtcagggaagcttcctggaggaagcaacatttgattcaagattggaaggatgagcaggagtctgctaggtgaagaagagaagctgaggcattgcttctgtgcatttgtatgaacggttaggggagtggaaaccttaagagcaaagagacaagaaaaggagaatgtcatcccaaccccatctgtctctatcagaaggtttctaaacagccacattcactccattctaagtcacccttagttgtaaattgcactcacaatgtaataatagtttttcaagtaaaaagagacatactatagtagataaatgttgatattgactataatatgcatcccaatttcagaaatgttaaatcttaaaaaaaaagcctatcttagaagcaaggacataagatatcaaaattcaaagtcggtcttgaaatgattattgctattattgtcattgcttttatattgaggtctctggttgtcactgctgggacagttttcattggccatctctgctgcccaggcacatgcttccccaccacattgataggatctcttgcttcctgctcaaacctcccctcttttctccccagctccttaattcccaatcccttgagttcccattgatttctcgcatggtgcagtttagccatgcatgaactcactgccaaccatctcaacctaaccctctgaaatgtatccagtaaggtgtattacaaaacaagggcagctctctcagtgcagtgagcatgccctgagacagcttgcaattctagacaggggtgagaatatcaggaggagaaattgtgccactcctttgcagaagggaactggggccttactgctttctcaagaggcagcattggaatggcttctagaaagatgggcttggccttgggatggtgaaaatgctctctgtctgtgacctctggggctcagccaaggcagggatggataaagaactaacctgccctgcctgccagccaaaaatagtgctaactgcgtcacagagcttttggtaattaaaccttccctctgcagaaagctgtggcttggactgataagggaccgtggatgtgttaaggtaattcactcccaacactgacattcttcactcaacatcagaagcaggctggaaaactaagtggaactagatgaagtttgagattcataaccagggcatggtatgtaagtagcaaaaagacagaacatgtgccaacaaagtttcttatagattaagtagttctttgtttttactctgagtcatatggacttttttcctttttggtcagtcagcttagttagcaactttgtttctgatcataaaaatgcttcatttttgctgtagaaagttggaaacataaaggaaagaagcaataaggaagtaaaaacccatccatcatcttatcattcacagatagccactaggaaccttttgtgtccacttttttctcgatgcaatgtacaatttttataaaattatgatcagggccagatgcggtgactcacgcctgtaatcccaccaatttgggagaatgaggtgggtggatcatgatgtcaggagtttgagaccagcctggccaatatggtgaaaccccgtctctactaaaaatacaaaaattaacagggcgtagtggcatgcacctgtagtcccagctactcaggagattgaggcaggagaatcgcttgagcctgggaggagagggttgtagtgagccgagattgtgccactgcactctggcctgggcaacagagcaagactctgtctcaaaaaataaataaataaataaaaataaaaaataaaataataatcagagtatatctgcagttttctgtcttaccttttaaatgtacacacaatatactcccaatcatactgtatctgatggggtcattcaatattacttgaaaaccagactgtttttagcttataaacctccttagggcctgagctgagtggggtgaagtatctgggagaacacacgtccatgtcagtaggaaagtgctctggtctggagtgttcttcagacaggatccatggtcccaggagaaactgacatgctgtctgggaaagcagagatgttctggtcattttgggaggcagagaaggagtgggaagttcactggggagagcattatgcagagagaagagcatgggctcgtaagtaaagcattcctggcttggattctgtctctggcactaatcagttgcctgatcatggttagcctacctaatcctctaaacctcaattttctcacttataaagtgggactaatggtattatgtatttcactgggttattggaggatagtacctgactcagagtaagtactcaatgaatgttagccatcattagtatattatttttattaatctctccaacaaggactgggtcagctgattctattggatgaggatagtgggtagatgggttcactctttaagataatctttaaaaggaagtaaaaatattggtggcttttagtattaatatgttctctcagagagaaggtgtatttaaagtttaggggagtcagaagaatgaaatcttaaggctccttccatttcattttccagaccatgaattgaggacacttcagtgcctggtaggagatttgggttcagaccaacaagcagctccaatctcagcccaggcatcttcctaatcaggcttgatgggcagctgcagctataagtatttaaataaatcatcaaagggtttgttgcatcagccaagctttttagagtcccaaatttaaaagctgagataaaatcttatcttgctgtgtctttacggaaggatccccagatacctggggttaaggtctggctcaagtcaggacctaggaagcagcatatgttgactggagagacctgggtttgaatcccagctgtgcatgttattagttatatgaccttgggcaagattcacaaccttagcccttctttaccttctcaccctaatctggggtaaacatttgtaccttttggggttgttgcaaggattaaaagaggcaaactctgtgacaatgcctagctccatgctggacttaatataaatgctcaataaattttgacaccatcttctatcccccatatcctacaagataaaacaagacagaatgagaaagtgcttaggtttcttcatctgtaaaaaggtaattggaaaaagaaaattaaaggcagaagctcactcagcctctagggtctgggagatgtcttcttgttgtttaagttttagtctgtactttctaaaaaccagtagtgggcctctggcatttcctggcacatcttagcagataggtattgaatatataccatgtgccacagtactgcgccctttgtatgggtgatctcatacagtgctttcatttcatggaggagaaaaactgaggctcagagacatgaagaaactcacccaaagtttcttagctgttaagtggtggagctgggattggtacctaggtctctctgtctcggagcccgtgtttgtaactaccccgaacataggtctctaaccatataggactcctactccttgctggaaaacataagtacaaaacagacaagaatggccttttcaattactaaactgtaagccccctgagcccaaagactgtgtgttccccgctcaatcccctcccaggcatgcagctaataggaaaccctggagacatactgggaatctaagaatctgggttaggattcctttgaaatgcagatgtcctgtgagaagtaagcacctgatttcttatatacctgagttcattagatacttatctttgatatgggagagagtagagctttctcagatacctgggtggctagctgcagcgaaaggactgaaaatctggaggggaagagctcttctctctctttattttctcactaacggaagggagtaaaaggcagaggaagtgggtctgagatgaggaagacagtaccacagggttcataagatgtacacatcagaattcctggcttgcaggccctgggcattggctggacaaggtttgttggtctctagggcacagaaagaatctatgcctccgaggattcatagaaaattaccacttcctctgtcattatcttttatttattattctctgtgatctgttggtctttgattccctttgtatttttgattcttttgtgattctccctttcgatttggcgctggtttttaccctgatctcatctgtatcgtccacacctcaatgcaggcttcccgcgcccctgcccgggctcccgcagtgcccccatctacatccctgcctccagtcttgttcattgctgctgccagattcacctccctctatgtccacctgttttggaaccttgccactcccatcctgctctgagcttttgctctgtatttcctctgcctgatgtatcctctcccctttcctcttccaaccaaaagaaagtctacctatagccttccaaactcagcacacatccttctcctttgggaacctgttcccaatgattccctcaatttctctgtcttttttttttttttttttttttgagaccaggtctcggtctgtcgcccaggctggagtgcagtggtgtgagctcggctcactgcagcctccacctcctgggttcaagcaattctcccacctcagcctcccgagtagctgggatttacaggggtgagccaccacgcctggctagtttttgcatttttagtagagacagggtttcaccatgttggtcaggctggtctgtaactcctgacatcaggtgatctatccgcctcagcctcccaaagtgctgggattacaggatgagccaccatgcctggcctctgtcttcttaattctagtagtgctgatgtgtgcctacatcagctggtcatgtgcttcctcccctctgcttagggcattgtttacctcttggacatgacttctcacctgtttgctttcctcccatctatgtcaggagttctttaaatttaatatttcttcttcatttattgagtatctgctacatgcgagcaccctattgagggttgagaaacaaagaggaattattaggtttgctcatcaataaataattgaggtgagacccttagaaatgtgtgtccattggcctgcttcaattttagacagttttttcaccaactccaggggaggccaagccaagcatgcctctggctcttgcattccacatgtctcttattaaaaacagatggcccaggactgctttggccattgcaccagttgacaggcctgttcctggggaggctctgcttatgaattctagaatcctttagctgcattagtaacaattcctcctgcagagcaatgaggggatagtgtctgtgggctgggcactttccatgaataagaaaggcctgaattcaacccaggtgccgcccagacttgtcacatggagcttggcctcaggcaaggccaaaatgggaagctagcttcagaggaagaggtcccttctgccacttctgaattcctgaagctcacaacaaccagcttctttgtcctcatttttcttaggaacaaatgtattcatttaacaaacatttgtggctgagtgtggtggctcacacctgtaaactcagctcttttggaggccaaggcaggaggattgcttgaggccaggagtttgagaccagcctgggcaacatggcaagacttcatctgtattttaaaaaattgctgagcacaatgatctctgttttcccagtgcctgcttggctcagggcctggcaccgaggtaaatacaactgctgctctaaataagctcatctctaagaaatgaaatgaatgcaaactattgaaagcaaggaaggcaaatacgggcatgcatatgtccacttcttaattttgtgtccacggcagatactgctaattaatcatagaactcattcactttgaatctggatttaagtgaagattcagccttggaatccttctgaaaacattgctccagcagccactatcagtgatttggactttgcccatgagatgaaatctgcttgtgatcctttttctggtctttaaagtggtccaaatgccactggaagtggggagcaggggttcaaaacagcaagtatattgaattaccatgtctgtccagagcagactaggagactccattcatgggagtgtccaaaagtaacaccgctattgcagaagccctgaccattgctccttcgcacttcttctcgctctcatggctcctttctgtctgacttttgtggactcctcttcctcctcatacccctcagaagtggctgttttgcaaggttaaactcttatccctcccaaactcttttttcttgtctgttttctcagttggagagctaatttcttccctcagctttttctagctttttaaagtagttaactgtcaaatctgtatcttcagagatgtctttttccaaagtctaaactcctccctttggcactgaagcacttccaccatctgaccctatttatctttccagtcccctttccagtcccagctccttgcctacagaactactgctgtgagcacgaggtcttcttccatcctgtgtccaagatgtggggtacccatggggagtcctgctcccatgccttggcacatgcccctgccctgcccctcttctctgtttggtctgtcatatccatcctatgagtctccgcttcactgtcatttcactgagaaagccctttctgacttctttatgatttcagaggataataagtgccatgagcagaggatcttactagcttacgctttgagtcactcaacaaacagttattgactgcctcctctaagtccctggcgtatatgacgtgaacctgccctcaaagagcctacagtctgtttacatttctgtcattagttactcttgtttataggtcatgtctctgccattagatcgaatgccttgtggtccagagctgagtcccagtcactgtatcccctcaatcccctgggtatgccagatgctcagcacatcccgagttgagtgaaaggcagcttctttccctgtctggtttgctggtggctcttttgagtgtgtgattcttggggaggctcataaagggttgcagagctggcaggggaaggagtagcccatggagactaagggaggaagaagtccctgctctatgcttgaccccagaacagcaggaggtgggatggaaatggatgcctcaaatggaaagcagccatggctaagatgcattaagaacatgggtctaggggagggatagcattaggagaaatacctaatgtagatgatgggttgatgggtgcagcaaaccaccatggcacatgcatacctatgtaacagacctacacgttctgcacatggatgccagaacttaaagtataaagaaaaaaaaaaagaacatgggtctgcgttttaattgttgcagctcttatgcttaatgattgtgagaccttgagcaagttacttaatttctctgtgacttggtgttctcacctgcaaaatgggtcttaaaacaatgtcaactttatagagaggttgtgaggtttaactaagaaaatgagttaaaatgaatataaaacatttaaaataattattggtacaagcattggctattacttagattttcctggcagtgggatttactggtgattttcatattcatcattgtatttttctgtagacaaaatgtatattatttagctcatctggaaaatatattgtaaaactatttctttacctttttttaagagacagggaaagagtctggttggtgaaggggttatagttaactctggtaacctctgccccaggtgctgtgtgggtatttcatggtgtgattggtgtggggaggtaaccttcagctccccgtcttctgcctgtccccatcactggtccccctccagtcccaacagtcagatgctcacagtggcggtgctgacctttctgaatggtgcaattattggcgcccagtgagccttgcacagggaacagggagtgaaatcacccagcacttcctctgcaaagaggatgtgatcttcagacagtgcaatcacaggcaagtgacctcagtttcctcagaactcagcagaaggttctgaaagctggaaggccatttgcagaacccaggagagaaaggagggaagacaaggctgggtttgcaaaagcaggagcaaggtctgcacgttttatgaagtgttttacagtggagctgtaattggaaccctggtatttagcaagagttatgaggtgtgatggtcttagcactgcgagtcctttggcggcatatgtgatactggcatgaaacaggccaagcatcatggactggattgcttgggttcagcatgctgcttaaatcggcttgtttattatttttaaaaggactatttttttttactcttggggcattcaaaactccacttagagacaaaccaaaaatatttctcagttacgtgctcactgtttgaatcagagctgctaagcctaattggttggtccaattctcttactaccttctggagattaaaagctcctctagctcacttccaaatcagagtggatggaatttgatccaatccaggtgctcagggctccagaagcccttcctgttacagagagggtgagtgagcaggccgaagattgtgctttttattgctcgaagatagtttcctagtccttgaagctgagaaagcaggaagggtctcccattctttttgaaattcagaacaagcacattgtctgaagagggaggttggccttctttttgtctttcaccatgtgagggatggcagccaggactcagccttttggaatcacagagccatgtcagaagcaacaactggttggagtagaacaaaggatcttaactaggggctgtgggtaaaggtcttccggggtctgaaattgtaaggaaagtttgtctgtatgtgcattttcagggggagagttccataatcccatcaagcatgcactcacagaatttgacctgtgcactgtgtagtgagagcttgctactatttgtagcatataccaagcttgcttctgcctcaggcctttgcacttgctgttccttctcagaatacttttccccaagatccacatggtcactgtaactttcttcaagtcactggttaaatgtcacctcctgaccaccttatattaaatatcccgctcaacagtacattgcttcattgttctttacagtgcttattccatatgacattgtttgttattacctccctctttcagtatgtaagcctctatggtattcactgctgtatctgtagcatatagaacaatgccaagcccagagaagatgctcagcaaatgtctgttgaatgggtaaatgcatgaacaaattaataactttgattatacttaggtctcacctgtaaaaaaaaaaagttttaatgatgggtaaaaaaggatctgagttctcagtggggccacttctcagccatgtgtcttgggttccagacatttcatctgctatgaaatgatcacctgacattgtaatagatgtttaggcagaagttttcaagggatttcacaatgcttgtgcatcattattaatttctgtttttcgaatacaccagatctgtgtgtgtgtgtgtgcgcctgtgtgtgtctgtgtaaaaatgtgtgtgtgtgcctctgtgtgtgtgtctgtgcacatcctggtgcacagatactattattattattattattctggtgcacagataataggttatctccatttgaaaatggggatgctaatactactgctactgatgtgctagggtaggtccccaaattcccaggggacctccatcctggttggtgtccaggctcttgacaccagagccagaaggaattcaaggactagtcaggaaaatagtgaaagtatggagagttattgcaagtgaaaagtatacactcaagaaaggggagtgtgtgtgtactcaagaaagtcatgcccagtggggtttgcggcttctaactttacgagtttctttaaccaaggagtggaatattcatgaaggttcctggaaaaaggtgaagatttctcagaactgtggtgccacccatttttacaccaaatatggttgtttcggaactgtcatggtgctggtgggtgtgtgatttggtatgttaatgagtgtataatgaggtcctaggtgaaacctaggtcaaatccagtgctatgttgggtccagtcggtcctagccagcttgtcccacatcctgtttttcagggtcttttatcagcccctagcctatgctgctaattcaacagtttcctttttgctagttttgtgaaactgcttctattctcctgcaaccaccctgtattattcctgtctcactactgacacaccagtgtggtttttgtgacttgtctgaagcctcacgatgtatcagagcaggatagtgatagaagtccctcttgcaaactccagttccactctagaaccattagtgttccattctggaaaagatgtcctagtagttgaatataggtggtcaagaccaacttggggctagtattttctgacacatgaacttgagtgtgaatgggatataattgcgtctgctactgaatgtgtagggttaaagttcagaaaagagatgctgcattcttctctaatcttataaaatttcattttatttttttaattttatttttttgagacaaggtctcactctgtcgcgcccaggctggagtgcaggggagtgatcactggtcactgcagcctcaacctccagggctcaagcgatccttccacctcggcttcccaaagtgctgggattacaggcatgagccaccacacctagccattgttctctaatcttacatgaggcagcaaaagttaccccactagaaattattatgctgtggctccttttgaaccaaggcaaaaaaaacaaacaacaaacaacaacaacaacaacaaaaaaaacactcatttgagaggtacattacatctgagagaaataaactctggtctcttctagacaaactgctttgattttcaagcataaacctcagactcattttgggcagaaagttactttttgtcggtatctgcatcgggtgagcttggaggtaaatcttcacacagagcttagtacatcctggataacttcctttataaatgacagcttcttagactcatcttttaaaagttaatatttttcttgttaaaacaaatgctgtcttcttccaaacatcttagatggctgattcaccatttcttaaaagtagttttaattgtacagcatgatacatttatatgcattattttaaacgtaaaagcctagcaaaaaccctacaaaaatatataagaatctccatttacacacctgtctgcaaaaccctcatccattcccagaggtaatccttgcctatcattttttaacttttctttccagaatttctttccaaacattataaatatacacatgcatatgcaattttcaacttcttaaatacatcttagatatttttccatatcagttcatatagcaatgcatccttctttttaacaggtccatacactttcattgcatcaaaatatatcagaatttattaagcactcctctattgatgacatttaggttattactcagttttttacttttataaacaattctgcaaagaatcgacatctttgtgaacatacatccacatttctcaagacagatgttaagaaaaacattttgggatgtgaaaaggtattacatatcttaaattttgatagaaactaccaaacttacccccaacacccaataccggtttggactcccatgttaaatttacctgtccttggcaatcacagatgttgtcaactttttaaagatgttttgtcaatttgatggcaaaaattggtgttttcacttactctgccctgattgctaaggtagttgagagtgttttttgcatgctgcttgtgatgttctataccttattaggtttttttaaaaaaatatttttaaattatactttaggaagcggaacatcacacaccttattaggtttttaacagggttttaaacattttcgtgaatacgactatttcagaaatgcttcttctccagggttgctatgcagctggtagttaaaatatgccttcatttattagtattggtaggtagtaaatacttaaatacttgttggtaaggtgcgccaacccaagttcactttcctcgatcttaagtctcgttacccccacttctcccctctacctctccggcctgggacctccctaggaggcaacaattaagaggttaatatgtagcacttcggggcgaacctgaaccttccagaggctgctctaatgcagttccagcctctattcagatagtttggcatattgatataccatttaaaaaatattttgacaagtcccttccccgctgtcaaccaaatgtactcaatctgtgttttatgtaagttcctggcgtctgggagattcacagtaacatactgctggtttgctccttgaactggtcactgctttgtttgtcaatttctcaggattatgcttacataatttccttttgaccttagcctccacaccataatcccagggggcacactgggggaataagatgacccttatgtaacttgttacataagagtccagagaagctgggtctcacttcagtgtctgcacagttttctaagaaagttcatttagttttctgttgtctctttcaatcaataaattctttaaaaaagcattccctttacttctgagatgccaaaggggaggggggaaccaggccaatactgattgcttctttgtagttggcacttaatggaagtgatcccatctaatttacgctacaatctttttcctttgtatggacaaggaaactgaagctctcagggactaaagtgagtggctgaggatcatacagctagaaaggggtagaagtaggctttaaagccagacacaggttcttcctacagaatatgtgtgtgattcagaattgtgcaggacagctctgtttcatgtcctattcttttgaagtgatagacattgtccactgactatactaaagcagatagggagctcagatcattccatggacttcaagtcccttagaggccagactgtggacagcccttttatctctgtgccagcgttgccctgccctggctccagcagtgcccagatggactagaggcctttgtggcctgtattttggactccttcctatcaccctttgccctttacctctggcttggcactgagttggggcagacaccaaaggaacaggtctcatgtaacatcttttcctgacatgagctgggtcccgttgcttcttctctctgctcagagaagtgacacgtgagcagagagctcatgtcagtgtgtctgcatggctggtattacaaagcctcaaggaaaaaagcttaacaagaaagcctgaggaaatggggttttggtcatttaaattttagggtcattgagggatgaagccaagagggctttgtcattaaatatatttttgataattccctcttatttttaatcctaacattgaaaaagcaataaatgcacataggaaaacatttaaacagagctaaggagaatacagtgatctgtgagtcaccctctcatttgagatacccattttctcagttctccctagaagctgctactctcagcaatattctgtgatctttccagaaatattacttgtaatctctatatatacaattatacatgtatatatttgtgcttatcaatcttctgtgtgtccaatatccatccctccatccatccatctgcccatccaacttatgctcaactctcatggttgaaaatcattaaaaaatgcttgaatccattctctcatttgatgtggtgtgttgagaccagtggacccctgacagagggtcctgtgagtcaccaggatccctatctgaaacccagtcctcatgataaggtcctccagctggtaaaggtgtaacattgagccacacactaaccaaacatctccctgagagattctgtttccataccctgcactgcatgtttccttctggagtctgtccccttcaaagcagagtataagaagatgccctgtggaacggatagttccagttaggtttgattttatgaaatctcttcttcagcaaaatctgtcctgactgactccttgacacagaagggccctgacccacaatcttgttcaccgcattgagattccctgattccatgtttcttgctgaatgactaaatatcccaacagagggaggtcaagtttctccccagcaaaaatttttcccagttaaatggcaagaatgaagagctgacaaatggctatgacatcactctttgtcataacttgccccaaattactgcatgagaagccagtactctactgggtcttgccatgggacagtcataagtagaaaacaagatgatcccccaaagaattgccctttagagagcaattcaaagacaggaaaatcacccgttggttgtgtccctgcttctagccagatcttctagagagctctagatgctgaccccttcatcttgaaaagctcagtggagacctgggtcctagcctctgccacttactggttatgtgatcttgatcaggtgtatcttagtgggtaaagtaattgtgtctatttcaaaggactgttttgttttagttgcaagtgagggaagcctaccttagtctgacttaagtgaactagagaatatatcagcttgttaaccaaagagtctagagataactttaggtgtatctggatctaggagctaaaatcttattattaggactgattctctttccatatctccttgtcctcaaacaaaggcaggtcattcccttataagctcccggcagctctggacacatcctagcagctaagaaacctcagcaaagaagagctcctccttcccactttttctagccaaagtcttaggactatatctcactggaccaacttggtccacatgatcacccacaaatctatgtggttatgaggatagagtatcctgattcaccagtcctgagatgggcatgggtcagttccatccaaaccatagggacgggagttagaaggggaattgccctgagaagtcgagaggatagaaccaaaagagtagcaagcagacactagggaggcaaaaaacaacagatttgttatgtagggtctaaaagaagggggtcaacaagtgttttctgtaaagggtcagataaatattttagggtttctgttgcaattactcaactctgctcttggagtgcaaaagtaaccgtagacaataggtaaacaataggcttcgctgtgttctaataaaaccttgtttataaaaatgggctgttgactggatttggcccatggctgtagtttgccaactcctgatctatgcagatactacaatcttcttgtcccacatattctagagacctgaacaaataagatctggcacatgcaaagcacttaagaaatgctagttattattatattgttattatttatgctatactaaggataataacaatgataatgttgatggtaattataatactaattagataatgagatatgatgaattatgagtcataagtcagcagtgtattccaggactgtttctaaactgttggtggagcttcccctccacatactcatagagctggaaggcaggggagaggcatccaactcaaacatctcattttatagatgagtcttaggctcagataagaggcagcacatgcacaagttcacacagcaagctggggcagttttggagtttgcagctgtttcttctgcaaccttaaaggactctaccctataggtagagtctgtttacacctactggtacacccatggtacacctgttataccatggtacatctagtacatttgaacatgcaggtgtagttagatagatattccttgagttttggatccatactgagtagtgtggtgatactgttggtaatattcctgaactggtggaaagacctgatttgtgactagcatgtgttatatgactcatgagaactccctgctgctgagatgactcagatgtctgttttacacaaagattaccaaacacctctcgccacgtttgaaaacaatgaatagttactcactgcctttctgactaccctctttgtcactatttctattcgcttagcatgctggcagccatttaaacagctagtcttctgtttggctggatgttggtaggaggagtcttctttaatcccccatcaacatggatacagagaggcctgtgggcacttttctctgtactcagtgtagacccattcataaaattcttcatgattctggcaaaaccctccctggattttggttaaccagcagctctgcagtagtttaggaggtggatattttacaaccacaactctttagctctttttttccccaaatttatttccaactttcatcactcagggtcatttacataaatcaatgcaaataaatatttttcttgagttaaaaaatgttatggaatctgctggtcccaagtactacagagacctcagtacactgaatggaaaatttgggatttggtttactgttctaggccaagggtcagaaaacatttttctgtaaagggctaaagagtaaatattttaggcttcatgggccatatggaaagccatgagttgctgaccccggctgtgagtgcttgtaatttataaatataaaattggaggatggagtatttgaattggctgcctagttacttgagcatagtcctacaaactaaagtcttggatttgggccaatgtaggtttagctatgtgattctgatgcttactaggtcattttaggcacattggtggccttagttccttgtctataaaatgaggataataatagcactctatctgtttgttccttcctcctacttgcttatagaattgttgttgtgaggatcaaacaaaggaaaccacttatctcagagctagtatgttccataaatgttgagagtataatcaatactgttattaatatcaaagcccattgggtgaaagcaagtattcaagagcaaacaattaatgagctgattgggtcaccttcaaagggttctagatagagatcatcaagaaaccttttttccttctctttttaattttaattttaattttagttgtggggtacatgtgcaggatgtgcaggtttgttacataggtaaacctgtgccatagcggtttgttgcacttatcaacccatcacctaagtattaagcccagcatgcattagctatttttcctaatgctctacccccacccaccccaccccctgagaggcccagtgtgtgttgttcccctccctgtgtccatgtgttctcattgttcagctcctgcttataagtgaaaacatgtggtgtttggttttctgttcctgtattagtttgatgaggataatggcttccagctcaattcatgtccctctgaaggagatgatcttattcctttttatggctgcatagtattccattgtgtatttgtaccatataagaaaccttttttcagcatcttctgtgggaggatgtctgaagagactggatcagatttttaacaacattttttaatttaattttttaaaaattttatttacttaatttttttgagactggcttatgagactacctaatttttgtttttggtagagacagggtttcaccatgttgctcaggttggtcttgaactcctggcctcaagtgatccacctgccttggccgcccaaagtgctgggattgtagatatgagccactgacttgggtgagactggatcagattttgcttggcattgttgtgaagaccctggtagtaactcatgatagactgtcttcctttctccaaaaaatgaagcctcacattattcaaaggaaaatctcaaattaaaaatcctttcctgagcatttccttcagctatagagttcagctaaatggcatgcccagggtctggatcatcaacacagtctgaggtgatgagtgattacaggccagaggagtactgggacctctgctaatttgttccccgtgacttcatcacagctgcccttggttgtgcaattgcggttgctatggctgaagtttgaaagaacttggcctgaagctgcctatatggccaatatcttgggggaaatatagctttcaatagataggttttatgggtatttgtgaagaattagcagctatgaggttgaggttgggtatgttgatgagactggaggagaagtttgcttgagagtggcaaaatacaacaatacacaacaatacacacacttcccccccatcaatgcatacactcttaactactttggacaattgaaggctatgtctatgatgctgtaaataaagaaatattgaagaatgttattctcatcttaaagtatcaggttctttcagctgccatattgtaatgaaaaggggttgggtttggatgaagacagaccaaggtgtgattcccagctgtctactcctagctacccgacaatggaaaagttacttaactttgctttctcatctgtaaaatgactaacagtcacttctcatattgtacaaaacgtctgtcttaagggatgttgcaaaacaaaacaaaacaaaacaaaacaaaacaaaacaaaacaaaacaaaattgctctccagccagactctacaagctgtgagtccaactcaccaaatcttcacatcctgccccccaaagtagactggtaaagaaaaggctgaagtcatgtctcagcatttgagcattgctctctagtcattgctctagagagttctaatcttggggctactgataataaggggccatgcagagaagatagtgaagccctcctccacccgctgtaacctgctagtcagtcatcaatgattcttaaagcactgcctctgcctgctctcaggaaggtgagatgacgcatcacttgcttttgttttcacacctgtcccctgggaacctttgctcaaagttgtaaattatgtgacatctttagtaacaacaacgtgattcgctctgttaaatcactccctacctgcttgtagcctggtgaataaattttcattccttttttgaagattttacttaagcatatgaagaaagctcccatctgtacaatgatggaaccaaaagggacaggggctgctaacttaatgagagccaggcaggtatgcacatgaaatcaggaaacagtttgctttcctcttaacactctcttcagaaagacagcaatggaagcctgatgataaatagtaattgacacttcgcattggtgtcaaggagacaataagggatggtggggactgtggcagactggaaaatccatgcctatctaagggacaatcacttcttagttctatctgattgttgccactcagggatctaggtttcataattataagtggacaaaaccctttagtaactttcaataataatactgaaacaaagtgcattgaagtttacttaagaaaaacttaaatgagcagtggcttgcacctgtaatcccagcacttttggaggccaaggcaggtagattacttgaggccaggagttcaagatcagcctggccaacatggcaaaaccccgtctctactaaaaatacaaaaaaaaaaaaaaaaaaaaaaattagctggcatggtggtgcatgcctgtcatcccagctactcgggaggctgaggcatgagaattgcttgaacctgggaggcagaggttatagtgagctgagatcgtgcctctgcactccagcttgggcaacagagcaagacactgtctcaaggggaaaaaaaaagagaaagaaaaacttacatgattaacaatatcttactataaattaaagggttttagaataaatttccaactcttcgtcattaacattgttaaagttactgcttatttagcttagcaataaagaaaaggaatccttatcttaaggtgaataaattctgtgacatctgttaattttggtataacaatataggtaaaagttatgttttctttttgtttctgtttatggtttttgctttttttttttttcctgaggcagagtctcattctgtcacccaggctggacagcagtggtgccatcttagctcactgctgcctccgcctcccaggttcaagtgattctcctgcgtcagcctccccagtagctgggattacaggcatgcaccaccacacctggctaattttagtatttttttttagtagagatggggtttcaccattttggcaaggctggtctcaaactcctgacctcagatgatccacccaccttggcctcccaaagtgctgggattacaggtgtgagccactgtgccccctcactgcaccctgccaaaggttatgttttttgagtagctgcgaaagagacctgttcggagagtgaatacttgatcagctgtgtgcggatggggaatgagaccactccagggagccaacctgaggaacagttggcagttgtttgaagatccaccaggtttagctcagtgggctaaggaagttaagagcgagaactgaagtaaaagagaaagaggagagagactctgaagagtatggggaggaagaacaaatttgcttataatgaaattgtattgcatgttctctaggtagcgtgtgctgcagacttcttccctttctccccataaaatacaaaaacaatttctgccctaaggaactgtggagtcgaatctgctctcagataaaggacaatgggctgagtgtgtgttcagggcagatggggagagggaggatggaggaagaaagcatgattgtccatggcaaaaaaaccctgccatttctgtgttaactcaaagccctagaatatatttgagtccagagatctcatctggacttatctgtaagtcttatttgacccctctgtcttaattttgtcatatacataattcaatctaccagcttttgctgaacacctattaggtgcctggcattgtacatgtcattatatagaggattcaaataaaaacaggacatgttccttgctttgatgtcataatttaagagtcaacctgataagtcactcggcgagaaactatccttagcataaatttgagactttacgagttgagcaggaacaagcctttcttccaaggcacttgggatgaaggcttttcacctcagttgctaaggaattaagtggtattgatgacccggtagccaacataccacatcatcaccacttccaggctgttgaggagacgtggtgctgctggaatgacttcaggaagtgcataaaaattcaagtcatgatcacttgtggtaattagaagccctagttgcttttggcaaggtcactaaacattagttggagcttctggtggacttcaggtttcctgatcctttccttgtgctttgtttaggcttctgtccaaagccatctccatgggagatgcttaagctgataaggtcctgccactcgctgtcagaggcacctcccagtccctgcagacttgggtccccttagtacctccaaatcactagtctctcaaaaattcttattaaacacctaacatggacagggcccagggatagatgtatggcccttccttcacagagtctaaggcctagtgggagaggcaaaccatatgaatgtgatgaattgtgcaacgttaagatctcagaggcatgaaaagtagattgggggctcaggaaaagattattcgaagagacaacatcaaagagtcacttaagatttcaggttcgaatgtgcgaagtaaaatattccccaaacaccacgaactgcatctgtgtatggaaaaggtgggaagagaatggatcgtgcaagaggatgtattgcacttgtggactgtgccatatcagcacaaagccctgtgaaccagcctgtctccacaagctaccagagtgataaatatacattcttctcttaagaagaaattctcctggtgagaacattacccttcaggggtgactggatggctcagtttatcacttgtaaatttagcagatcaaactagttgagaagcagttgggcagtcagtaaactgactggactgctgggatcaacagggactggatgtttagttcactttcaatagccacaaatttagcagctcattagaaggaaccaaagtaaagaactgcacaagtcctctgggaggccttgaaaggcttccatgggcgatggaagccatttagaggcatggtgttgctgagccttttaaacacgtgattagctaaagagagaaagatgttactttggtctgcatttctctagggcaggaggaagtgaggaagggaggagcagaacacttcagcctacatctcaggaagggaggctgagaagcagtgtctggctgagcatgctgcttctctgagcagatttctagaagcagcagaggtgtgggtgtggacaggaaactctctatgtctatcaccttctgctgaggctttttgtaaacaacaaatgagatagtgtagcataaggtctggtactaccttagtttcccattgttgcagtaacaaatgatcacaaatcaagaggcttaagacaagacaacttattatcatatagttctggaggccagaaatctgagttgggtctcactgggctaaaatcaaggtgtcagcagggctgcattcttttctggaggctcggaggaggagtctgtttccttgcctttgccagtttctagaagcttctcacatgccttggctcctggccctttcctttatctttagagccagcaacattgggctgtgtctttgtcatgctgccatccttcagttctttcttttctgtttccctttttcatgcataagaacccctgtgattccactggtcccacctggagaattcaggcgcatctccctatcttgaggtcagctgattagcaaccttctttgcaactgcagccttagagcccctttgccatgtaatctgacacatccacaggttctggggattaggacatggacatttgttggggcattactctacctatcactggtacagaataaaaagtcaataaatggttctattcattaccagtactccctaccaccttctttctctactgtgaaattacctatgcccttcagtttttcaaaggcagggcagaagcctcagctctggtagaatctgacgtgctggaggttgaaagtgagaaaggcagtctttgatgggcttaggggagtggggaagtgaccagcccttacctggaaggttgtgtgcaggtctgggaggcacaggcaagtaagtagcttgaggtgctttaaccaggatagtgacaaacttgggagaagagaaaaccctgagcagaaacttcatatgcctcaaaggttggtagatggagaagggattcagcttcattttctgtaagtgtcgtgattaagtgtgtgcaccttgttcaggccaagctgggttgccatcccagctcatctactcaccaactgcctgacttggagcaaatgtgctcctctctctgacctccagtttttcatctataaagaaggactaataatagtagctatcttgtgagagtgttgtgggaagtcaatgaaataatgcatgtaaagcatccagtacattgtctgatggcaactgttattattaggtagctccacaggatagaaaaataacctgtgggtaaaagctgcagggaaacagatataggctcaccataaaggaagggcttcttaatagtcaaagctatccaacggcgggatggttagagtagaagtgataagctgccctgcactgcaactgttcaggcattgaccagacattggtatgtggattagctgcaacagtgtcatctgggtgcttttgcaaaagcccagaggtctaggccccatccagatgtgatgaattggaatattcagggatggggcttggagatctgttttgtgctttgttttgtttgtttttatttaatatgctgttttttaaagagtagttttagttttacaggaaaattgagtggaaagtacagagagttcccatatacccctgctcacattcaggtgcagcctccccaactgtcaacatcacccaccagagtggtacatttatcacaagcgatgaacttacattgatacctcattatcatgcagagtgcttagtttacattagggttggctcttggtgttgtacattcatgggtttggacaaatgtatgatgatgtgtatttaccattatagtaacatacaaagtattttcattgccttaaaaaatcctccgtgcttcacctattcagcaccatgcccctccatagttttgccttttccagaatgtcatatagttggaatcatacagtatgtagccttttcaaattggcttctcccacttagtaatatgcatttatttttcctccatgtctttttttggatagatagttcatttcttttcagtgctgaataatattgcattgtctgcatgtaccatggtttatccatttgcccactgaaggatgtctaggttgcttccaagttttgggaattataaataaagctgctataaatatccctgtgcagtgttttgtgtggacataagttttggagatctgtatttttaacaagtgatccagagacagagttggggccactagaccagataatcatttgtccagaggctgagaggggacaggaagactctctagtccagaaattctagggttccatgactgttgtatgtagctcttggatcaggctctggtttggactaggtgttaactttcttctctctgggatccttcccatcccccaacagcaaaatcactcttttggccaaatgttcagtgtcgatgtctattgctagcatgaaattgcctaatataaagagcaagttttctcgggctggagggagagtgggctgaccagtttttccaagtccaggactgacagggatcaaatcctagctctaccatccattacatttgtgacattgagcaagtaacttaaccattcaatgacttcatttttccttcagtaaaagttgctgatagtagtacctatctcctgaggttattgtgagaaatcaataagttcatatataagaagacttagaaaaatacctggtgtgaagttagttttgagtaaatgttagctgctgtcatcattattgtcaccatcattattcttattattaccagttaccagacattagggtccctctgatgggggagtccttcccggtgaagaaccagagttggagtgaacccttgaggttatttcacagcagcaagtgctggctgagtcagtgggaataggatggttcctgtgtgccctcgttgcctgaagggaggagtcagttgagtggatgccattttcttatgatggtacatctggggccatggcaccagcagcatatattgtccaagacagacaacaaggccatagctccccagagctcactttgccttttctctcatttagcagcacttcctctctctatcttccctctccatgtgctagaatgcaagtctcataagtagctacctagtgccttggtgtagatggtagttctaacatgtccattgctctgtaaataccccaagaaagagtatacccataaaacactggactcaaaggcaaaggacagcacaggtttaactttgctgcagaaccacagcacaggtttaactctgctacttccaagcttcatgagcttgggcaagtttcagaatcttctggagcttctgtcttttcatttctaagatagaataatccttccctctccgggatgtcattaactcttgatgaatgcaaaaacgctttttaaatgacacaaatgttattattagcttatttgttagaaagttaaactgatgaaatgttggttattatttacgattgaaagatgaacacaaggagaagagtctgcttgggttcctgttatggaagacaagaaaggaaatgtatgagagttctttgctgttatgggcatggaagagtagaaggaagatgaaggccacaaacttcttctttggccagtgaggtcactctgttataacctggactaccttaaggccccgctgttttgcctcatctgaaggagatgtttacatgttcccaaagtataaggtgttctttgggcaaaattagtacctgttcttttgctgggaaatccaccagtatgggaatcagccatttaaggccaaagatagatatactatatgtatttacttctaacaccataatttaatttgcctatttttcaactttagctcaagtttagcactcagacaaaaaagcacacaaatcttacatgaatagtgtgattaatttccacaaactgcacactcatgtgaaatgagcatctggattaaaaaggaaaaaaaggagaataaaattgctagcattcaagaaacgctgtggaggcctcagaatttcaaacacggttgacttcaagactgatcctggcaatggtatgcagttagcaaagtttacgtcatttatgttttgacatctccttttgtctggcttccagatatggttctgtccaggacctatattaaggggttcctccagacaattctattttgggggatggattgagaatctcctttatactaaggtgtcagtgaatgggttgctttttccgtgagtttctggcttaaatctgggtccttgggtggaatccaaagggatagttctctcaaggaggaaatttgggtctctgggagccagaagtgggtgactttgaaggtctccagggaacttttgaggaagctcttaaacatcatctcacaaaagaattgtgtggcgttttgaatgcctgccatggtaaatcttgcaatttgcaaggtcatggtagtgacttgccttcttgcttgggattgatgctacattgcctggttggctgctcagtctagaaggaagaaaaaagagacagactgcactgaagaaaagcagttgtaaagtgtgataaaaagacccagtcctggctaaggtatacagcacctcacccagtttctgcctagtgcctgaaggcgctgcagctaattaaaccacctcttagtcaacatcccagtcactcccatctgggagactgattggaaaggctcagtttgagaaacttcagaggctagaagaaactcccaggcctgagggccaaatcctgagctcttttaacctcaagctcagggttccagtggctcttggaaggggaatgagtactcatgctttctagcagaaggaccacattttggagggtccaatttagagatgttgatgcttggtagttgggtcctaagatatccttcacggacaagtgcatcttcccgggtcctcatcagtttccccaaaggccttgttgggtgaacctagagtggttcctcgttccatcttccctcaagagtgctgggagcattgaggccaccatccttggtcagggcagctggatcacaaccaccagcagaaaagaaccagacctgctgtgatgctgcccgtttctgctacacactggttttcccaatgcaggtgttccctcctttttttttttttttttttttgagatagaatttcacccttgttgcccaggctggagtgcaatggtgtgatcccggctcactgcaacctccacctcctgggttcaagtgattcttctgcctcagcctcccgagtagctgggattacaggtgcctgccaccatacccagctaattttttgtatttttagtagagacagggtttcactatgttggccaggctggtctgaaactcctgacctcaggcaatctacccgcctcagcctcccaaagtgctgggattacaggcatgaaccacttcacctggcccgcctgctttttacaggacgtgacttccccacttgaaaccatttctgatattccttctctcatttctctcttcttctcagatttgttagccttctggaccactacctcttacaatggagtgtcacaaagaacctgtgacaagaacatattttaacctaatcatccattcattcattccttcaggcaacataaactaattgagcatctactatgtgccaggaagatgctaggcatggtggagacagagacaaataagacacagtttgtcctcaaagtgtttatgttctagtggggaaaacatacaagtaaactgtgaaaaatgccttgagagcacaggcgacatggtaaactgcatctacaaagcaaacctgggagtcatcaaaggcttcctgagggaagtcattcctgagttatttggaaggaataaaagttggtctaagaaggctgggttggagggtgggtagaggatgttttagctagcagagatggtttgcttcaaggcaagctggcttattcatctggaaaggggccaagttgccccggctcaaaacccagagtgcatgccacatgaatcttcctcagcttgttgatgttgtgtgaagttatcaaatgtattttcgtcttgttccatgaaccagaggtgggtagccattacttcagaattgacaggcctttggggactaggctggccaatatgttcctgggccatggcataatctttatttttagaagaggttcccaatttgagatgatcaaacaccccaccccagtctctcattgggccctggaggctcattgttacttggtgtcttatttctgtttggggtgatgagtctatctggaaataagcaaatttgttgggtcaaagctggctaagtctctgcctggggaaggatttcacagaagtccagaggccatatccttaaggttgtactcctgatgtcttttgaggggttatccagtcattccatcatagggaggctgatggcagtgggaccttcccaggcccccacccactctggaccctctgggactttctgtttgtaaaaagcaccagcaccaatgtattggcaaggagatttactaaaactcaacagtgagtaaactctcttactggtcattttgcatcatatgagggatttcaggcaaagaaaggatattaaaattgagtatctactatatatcagatactatatcagtgctttcatagatatcatctcactggagctctgtaatgacccagtgagttgcatggtttgtccaaatgactaaatgtcttgtctcagccactgccagaaaagagacattttaaccaagaatcaatggccatgtaattatgtgattgcattccaccaacttgtcttctgacagttactcatcagagctggtgttttaacatctgtttctgagccaaacaaatacaacttttattgatcccttgaaaactttgtctcctgctactttgtctttgcagcttctgtgtagacacctgaaggctccactggctgtatacctgccattcattgtattagctggcttgggccactgtgcttaggaagcaatatggaaaaaaaggctcttctccttcgatttctcatcttgtcttttctgagtgccacctcaccagttccacagtaattgactgtgcctgatgtaggtggtctctcaatgacttagtggtaagtttagcactttgctggtcccaatgccagtttacctgtttgactgtgttcccaaggcattgacctgcccatgttagaaatctagacctgagaatgggtgaaggatggatgaggaattagaagatgctcacgtctgaattgtgtactgaatttcatcccaacccagctttattggccctagaaaaacatgcttccgtaacagataggacaggttaaaaggaacacaaaaacatcaagaaatggttgttgttattgttgctgttggtttgtcgctcatctctacctttccctgtgagggttgtggtatagctactgagctgtctcatggcgaatgaaatgacttgtcttcatggtcagctctaagcttattccatcgtgggtacctagaatggaatccacatctctagaactgaatgctactactatccttttccctacctggagaattagagaatcacaggattttaaatgttaaagaatttccaattcaaccctcttattttatagattaagagaatgggacctaaaaaataaaaatgggccaaaattgatacttaaaccttattgatatcttacattagaacgtgtttttaccatttcatagcagtttaccctactgtctgttgatcacagaaggtaacattatatccattttatcctcatacttttcccctgacacacccatttagcagccgtcctggaattagaacacagacttcctgacttccagtcctatcctggcccaataccatcatgattcaggatagctatacactgtattctttaaccagcccctcgaatggactggaagaagctatagaaaagaggtttgtgaagtctggagtgcctcaccagcaggaccagaaagtaattctgtgatttagcaaatgaacgctgtgaagacacaatgaatagaagaagggactgaaggagactttggaggctgtcaccctttaagtttcatttgcaggatctgtgacaacacggtatctgtcagagagagactgacatcttggttggtaaacatctttgacacagttaaggcaggtcttacaggatctaggaagggtggagggatttgcaggctgttggaaatgccagaaagtcttagagtttcaggcccttttaaagcaggggtggcattcttcaaggagctgggggaaaccctggatgtgggacaatcaaagctgaaatctctgcttcctggttcttggtgctcgagctgatgcaacaggtatttccagcattcttatccaaatacaacaactgtcttacgggagaggacctgcagtgagcactgtttttgttcttgattctagggtgacctagtgtcttccagtagggcaatctctggacatctttatctccccagtacctctccagatcctgaagcctggggccagggaggagaggttagatgtcagcagtggaaggacaggtgggtgaagcccattgcaaacctcacatcctccaggagaaacacaccagttgcttttaggctccctggggagtgttctgttgccacctcatcaaatcagtgaaggtggaaaaaagagtttggtgccagctaaggtgacactgaagtgtgcagcaggaaatctgaatccaacaccacatctaatgagcctattattacaggctattggcaaagcaagggaaatcgaatgctaatgaaaagcaggttctgagaatagtttaaaacttagcgttagccccattacacgttcccttctgagtcacagaggatgatttgcacgataagctgagcttgccttgaaccaggactcacgtggatttgcatgagaaagaactgggcagagattgcaatattaacagctgtttaaataattcaatggagaggctaaggctgaaggaaattatgggctcattgttaaaagtttttaattatcccaacagctgtcccatcacatggccttactttgttaggcagtggaggccatttgagagatcggcctgagttggcgcactggaacttccaacattaaggcattgcattgctaatattcctcaatttaggaggcagtcaagcagaaacacagatggtgggcagtgtcagagagcattagcctcgagggatttggtggacccaaatccaacctgggttttattgctttgttctgtgtgcacagccacaggacataggaagggaatattagtaaaggggtaagcgtgcccactggacgtgacttactgtgtatccggtggacttcccagaccagatttggcactttctgctcattgccatgggagcaaacctgctggctgttgtgaccttaggctttccatctgtatccaactcacctcttcctggtaaccatatctcttagggggcgctgaaatagtcatttaaaccctcataatattcatgatggtgacagggcccagcatgacttattacatattcatttgaatccatgtaaaaatcaacatgtggaccccagagtgtgcatctgggtgggagctttaggatcttggtagtaagacagatttccaaattgtgtatgttccatttatttgctaagctctagacaaattgcataaaatacttgaagaaacccctcatttcttctaggtttctattcaaatgtcccttcatcacagacgccttccctggacacttgatacaaactcatgctgcctccccacacactgctatccttctcctccacccttgatgtggtttggctgtgttcccacccaaatctcatcttgaattggagctcccataatccccatgtgttgtggaagggaccccgtgggagataactgaatcatgggggcagttaccctcatgctgtttttgtgatagtgagtgagttatcacaatatctggtggttttataaggggcttttcccccttttgcttggcgcttctccttgctgccaccatgtgaagaaggacacgttctcttccccttccaccatgatttgattgtaagtttcctgaggcttcccaagccatgctgaactgtgagtcaaacctctttcctttgtaaatttcacagtctcgggtatgtctttattagcagagtgagaatggactaatacaacccccctctgagcacttctcactacttaaaatgtatttatccatgcatttgttctctcactaaagtgcacactccatgatatcaagggctctgtctttttgtttactgcaacatctttaacatcaacaacagtatggtgcctgtaatatgggcccactagaaatttgtggaataaatgcacgaatggtcaaaatctgactgaagtggcatgctgccagtctgtctgcagaagggccttattcccaggggcaagcaaggggcccttttagagctgcttttcaattctcaatttctcttggcaaacattgattaagcactcaggactaggtgttaaagatcacaatcttgccctcctggggctcatagactggtggagaatgtaggcatttaaattaaatccatccttcaagagctgactcaggtctcggccccttctgggaccccttcttgaacattccttcttcttccctgaacctgggttaggcattgttcttatgatttcccatagactcctttgcaagcttgctcatggcctgtacataaagcagacaattacagtacaatgtgctttatgtttcctctctgagtaaaggctctttaagagtaaagattgtaccatacccattactgagtatagtgtctgatacatagagaacactcaataaatataagttatgcctgttattgtcactgttaccaggtgtgtttgcaatcagcatttatatagctgtttgtgtgaacacattttttaaaacttatatcttattctaaaggtatataggcttagaagcagctgtatattatataatattctatcatgctatactatatgatagttcccatgtcagtctctgtttgtgttctgggagacgtagtgattagttagactaattagaatagttggaatttttagattagtcagaatttttacaaagagttcttgggggactctgtgtttccagctgcgagctgagtccctgaattaccttaaaaattattttctatgtgcaaacatcaagaactcttacaagtcttccatatctgtttaattccaagagggtaactcacgagaattctctcaataaatatttgtgggtttatagtattttgatgtagccactttgatgtggctgttttgattcagggcttcagggacattttgttatggcctaaaaaacaaaccattaaagaggcagcaattttgtacaacaaagaaatgtgtggcacaggcatccaaccacattgccaggttgggtgtgtatgctaacctaatgtttgtgtgttttcactttgacatggctgttttgatgcctgacgcttccattacatcatatggatcttgccagaatggttgctttaaatacttcctagttttacttgaataccaaccatgtgcctgattctcatttcaatggcaggagggattcaaatgaagcagaaggcaaggagattaatgatctcaaggggactggagagttttgccaagagctggctaaggaaatacattcaccatttcagaacgcatactacctccattctttgtttgacatttcctggtttagagcttcagattacttgctggagacatgtttaaaaatggaaaaagatcccactgcaaacacagaaatatggtctatccacgttaaaaaggtcattttgatcatttccccctgctgtgttgtaaaatgaattttctgtctgtttcacttggcgaggggaggaagtgatatttgttgctcactgatcagaaaggccctcacccaactgctgtgagcagtcataccctattttctttttcagatggtctgagggattgttattgcacacatatgtcaggaaaccagaagttgcctcagaaattaactagatgaatagaaaattaggccattaaggggagactaagaagcctatattttgactaacattctcatctggtcatgcaatgttattcctaattttaaaacatttgggtagcaagtatattaagcagcctgttatgaaaaagcaagtagttgtatttgggttccaggtcttaactctgagactggaagctaagttcttggtgtcttgctagaatggcagggcaagtgggtaagccccctgaacaaaatgtcatccttgtcatgaagttgatgggtgttatatgtctcttctttgtgtgcactggagaaaggtactatgctagcatatttttgtttaatttttatgaagtaggcatcaggcatttctttctacaccccacacagctagcaagagttggagtcaggatttgaagtcaaggccctctgactccaaaacccacactattcccattataaccagttattccaaaacactggtctgcagctcggtgttggttccaaaggaagttttctccagtctatgacaagactatctggataatgcaacacctccctgtcttgaaagcactgtcatctgttcagagacacctctctttctaggtgtgaaaggcttattttttttcttttatcaaatgatggtgattgtaaatagcagctaaaaaaatgttctaagatatcaaagtgaaaaattggcctccctatggcaatccccaagcttacatctggaatcttattggcctgggaagtgacaaagctgaggaaggagaagtactcccattaccccagcaagggctcctttgggcagactcccaggatggcttaggcttacctgaggttaacccagaaaagggcttggctgcagccatagctggaggtgatcaaaatacttcttaaagccatacttcttggactctaagtggtattagctcttgccagtttagctgtcctgataatgtaggtggccttttaaaagccacaataggttgaattattattattatttttttactagataaactatcttttccaaaaaagaaataaagcttggatgatcagtgtttgtgacgtttacatgtcaggatggggaaggcttgagcttggagatattttaatgttgatgtaactcaagtatgactctcctgaaaaagtcacctttttactgttgttacaagaagaaaatagctcaggctttggagccagacctatctggatttggatctctattttagcctttgcaactttggtcaagactcaagtaaaggctctgtaacatgataacttccttccccaagttaccacggggggcaactctttggaagatcctaccattgcatgcggtgttcctttcctttactgggaggatccacatcagttctcagtgtgtcctcctgtcctgcttataggtgaccctgagtcacacttacttttattttcctgcagatggttccagattccaactgtgcctggagaggttcctactagtcgagcccctgaaactgtataggggaggtgccagtctctctaatctctgccttcacttctgttccagtgccaacaatatgcccaagcaggtggaagtgcgaatgcacgacagtcatcttggctcagaggaacccaagcaccggcacctgggcctgcgcctgtgtgacaagctggggaagaatctgctgctcaccctgacggtgtttggtaggtacctgcactaccccacccccagccccctcttctctgggactctcctggctctgtggggcagctggtctcagcagccagcccttccaccagaaaggaagccacgtggtttgcctagggccctgtctgcccaggcttcagtgatataattttcctccttacctcctctagccattcgttctcctttggattctagtagttcttaaattttttgcaaataaatatcttgtgagagtgttggcatgtggattcctatacttatggagactttgctttgggccacctgaaatgaggtcctgcaatctacatattagcaaacctaggtggttccaaagcattggtccatggaccacatttagagaaccgcctgcatcaagataagcacaagtattgcacaaaaccccactaaaatggctcccaaggtctgagcttcttcagacacatcattaatttaggtaatttgggcacattagctaatgaggtcagtgtggaagatgtttgccccaatgccttgatctgctccagctccatcttgcaagtcctcttcctcctctgcttcaggcctcacccaggcgatggttgttctcaggctattgatacaatcttggtcttaagattcccgtgagggtttattgaaaatggggcaatatacagtttcttgtaatgacaaccacaccatttcctttctcaatccctcccttgttctgcagctctcacttaggtttcacagagaagcagtgaacaacttgtccttcccacccacccacctgcacacacctacctgaacccctccattccatggcctttcctttgagacagatgccttggttgccagtggcccaggatcaggactgggagctcgccacagctaagttcacttaataagaaaccacaggcatggttaggttttccaaaggttacccgccatgtaaccacatctaattcatcacaggacttgaagaagttggagagtgggatttttacctgcagaagaaaaaaaatcaggctttcagccacattactccttcctcatctgtggaattaacactgtagcctgcattcctggaactccatccctcccttatggccagtggtactatgacccaacttgtggtttctgaaagggtcattcatgttggccacccatttgcagagatataaaatttttcttctgggaactttgagtctgtaaagtgaaagatccctgccagcatctctgcctaaattgtttcctccaaaattatatatcttagagtccattcttgagctcccataagatcagcaatctaaaagctatgtaaaaggacatagaagtcaaggacaagccttgagagtgagccatgaggaaattattggaagccaaagaaaatagatgggaagaaaaaaatagaattcacactagcttggtcaattaaatgttcattttatcttgcctccagttacaatgagaagacacacattaaatgccatgccatgtggccaagcttgagctgggcaaggaggcaatatctgtccttgtgggttctttctttcttttttctttttctttctttctttctttcttttttttttttttttgagatggagtctcactcctgttgctcacactggagtgcaatggcaccatctcagctcactgcaacctctgcctcctgggttcaagcaattctcctgcctcagtctcccaagtagctgggattacaggtttccgccaccacacccagctaaatttttgtatttttagtagagatggtgtttcactattttggccaggctggtctcgaactcctgacctcaggtgacccactcgcctcggcctcccaaagtgctgggattataggcacaagccactgtgcccagccccttatagtttatttctataaacaatttctggctccaagtagacaaatagcctcaaataagttggagtcaagttgccagtgtgcactttcataaagccttgagttctccttgactctttgggtgctgactttttaagaatagttggaggtatagaaagttctcttgctagtcatcaaaatcagcttcacttatctaatgttgtttttgttacacattgttcatcatttaatactgcagaagcatgagaaaggtcaatgttgctgaaataagtgtctagagtaagtcatttgacgaaggcaaaaaataaattcatattgttttccccttccttttaggtgtcatcctgggagcagtgtgtggagggcttcttcgcttggcatctcccatccaccctgatgtggttatgttaatagccttcccaggggatatactcatgaggatgctaaaaatgctcattctccctctaatcatctccagcttaatcacaggtaagactacctcactagtgcctggctaacatgggtcatactcctgccctggcttttaattaactgtagaatctcaatttggttgagtgaatgtgatcgtctatgtcatttcatttcagagctttggttttcccgtctctgaaatgaggataatcaaccctaaagaaataaaagcttgccatcgattagtcagtctatttgtctttctctccagcaaaaaaaagaaaaaaaaaaaaaagaaaagaaaaggaaacacagccacatgttacaagtgatgatacctctagtggttttaaattttttttttttttgagatggagtctccctctgttgcccatgctggagtgcagtggtgcaatctcagctcactgcaacctgtgcctcgtgggttcaagcgattctcctgcctcagcctcctgagtagctgggactacaggcatgtgccatcatgcctggctaatttttgtatttttagtagagacagggtttcaccatattggccaagctggtctcgaactcctgacctcatgatccacccgcctcagcctcccaaagtgctgggtttacaggcatgagccactgcacctggccttaatttttaatgtctacttttctcccctttctaaattatattttgttcagatactgataaaggtaatagatggaaaaggaaattatctactattttaattgggaattgagggagattggcattaaaaataaatgaaatgctaggtatgaaagccctctgagtttttcagaacaaagttactcctaatatgtggcatcatgttcacttatttttcactaccaccaagttggccaatgtatgatttgttaacaggtgtatatcctgagtcccagcatcaattatctttgactaaaataattaattactttatttgaaagaatttgttcttcctctgtgggcttatactggtattttcctccttaccaaataatattgctcaaacagggtataaattgatgccctttggagactaaactctgagttaagggcaggaagctgagctttggtccatatttgggtaccagccagctaagtgatctggagaagttgttcccctggactggccacctcatgaaagaagtgagtgaggctctggtaactccaggagattcaggggctgagctgggttgaggcttcagctggttgaccagtgaccccagtacctgaaatgctggaactcaggatcaggcacttaggggctaagtgggaccttatcattcagcgctagattgagtgaaagggtgcatttaccatcagtgctcctctataaaccagagaaaatgttctctgcacctgttaacaggtcatacgttggccaacttggtggggaaacctagctcccgtcggctagaattagactaggttgtaaagagaagtaggtcacacgtaggtcagcttaatttagagcagctcacatcactaacttcttcccccatagcaaaaaggactaacacccaaaaaggggttcaatctctctttctggtaaaagcaggaactgaaaccaggaagtgaacacattcaagaaacaactggaaaaaaacccagtggggctggagtttttgtgaatttgcttggaatttcctctaacctccctaggtatagatgaagtgcccaccattggcagggtgcttcacggggtgttccctaatccctgcatgaggctgggaatgtggatcttcatgcttcacctcagagaaatgagaggactgggcaaaatcgttattctcagactctccatgtcagttaccagtaatatattcaaaagacattttcagtgtggcacagaactactagctttttagtcttccaagtgaggacattaaaacataaataaataaacaagttaaaaactagcatgtaccagcagcatcgcttcataaaacaaaggagatgttaagaccaaaaaaaataaaaagtggaaaggaataatctcagaattaaaaatgggatgtcttcaactttattttaactcattattgcagactgacaaaaaatttgttacagaccatttgtaaactctaaacaggaggatctccaactctcccagttctgtaaaatcttgaaaatctccctggataatagaatgataaactatgggattgatcaaatattcaatacagtcggccctgcatatctgtgagtcccacatgtgcagattgaaaatatttgagaaaaaaaactaataaaaaatacaaaataatgcaagttaaaaatatagtataacagttatgtacatagcatttacattgtattaggtattgtaaataatttagaggtggtttaaagtagacaggaggatgtgcataggttatatacaaatactacaccattttacagaagaaacttgggcactctcagattttggtatctgttgggagtcccagaaccaaccctctcatggatattgagggaagactacagtaggagatttaatcaaccattaacacatttgagtaatatgaagctaacgtcatagaaatgtagacacaggtcattagcacaaacgtaatagaattaatccttctgcatttcttttcaatccagggttgtcaggcctggatgctaaggctagtggccgcttgggcacgagagccatggtgtattacatgtccacgaccatcattgctgcagtactgggggtcattctggtcttggctatccatccaggcaatcccaagctcaagaagcagctggggcctgggaagaagaatgatgaagtgtccagcctggatgccttcctggaccttattcgaaatctcttccctgaaaaccttgtccaagcctgctttcaacaggtaacccagagttcagatgttctctcttctccagtcctctaagttatcaaggcgataacttaagagtattttaacagaccaactctgggtagaaattttctaaatatataattatctctgtctaggcccagggattctatgaggtggtttagggcaggatcttgggattggagtctcctggttttaatttttttaaacatccctttttttccagctcacttaatatatttttgctgtgggattgtcctcctttctcccccaccccccccccccgcctctctctctctctctctctctctccctccctctctctctctctctctctccttatatctatctcttcctttcctttttgtgcatgaggctgggaaatgtgtctttgagttgtccatgggcatatttttattagccttgcccacaaccttctagaatacacagtggttctcaaacgtggcagtaaagctaaaccaccaatggcacttttaaaaaaatacaaataccctacacaatcagaatctccaagagatgaatctggagcttgggtagttttttaaattgtggaagtaatacatgcagattatgaaaattttagaaagtatagaagtacacaaagtaaaagttagaagcttctgcttccccttctctagagctacttatgttgagaatgctgtttcctcccctgtatttttcttttgccacttatgcaagtgtgcataatctttaaaagaattcaaccctggctgggcgtggtggctcatgcctataatcccagcacttcgagaggccgaggcagggggatcatttgaggttaggaattcaaaaccagcctggccaacatggtgaaaccccatctctactaaaaatgcaaaaattagccgggtgtggtggcgcatgcctgtaatcccagctactcgggaggccgaggcaagagaattgcttgagcccgggaggcagagattgcagtgagcagagccactgcactccagcctgggagacggagtgacatactgtctcaaaaacaaaaaacaaaaaaacaaaaaaaaagaatttaacccaatggtactccattgttcataaaacgttacatctgactttttcacagaacaatgtttgaacaatgaaaaacattgaacaatgttttaaagtcatctcttctttttttcatgattgcataatatttttaaaggataaattcctagaagtaaaaatgtccttgtcaggacaaggagttttgtattttgagtttgctggctgttgcaaaatggcactacaaaagtatgtagcagtgggtacagattccttagcaatgtatactcttgcttgctgcatacatgcctatacatttttttaaacttgagatttttttaaaacaggtgattctgttgagtggaaccactgagttagctgagtaggccccattcactaccctgttttctagccccaaggccagcataggctagaacacatcccgcacaccccggtttccattaacccaggtagaaactaagctaaaaccaagcagtctaagctaaaacttcagccatttccaagcacagaagaatgagcttaggaaacagtttgcttagaagaaaagtatgtattcctagctgtctccaaaatgtagtccttaaccattgctgagcccagattactctgggttgggatatgttccctggtttcagatactattttagtggaacatgtagcatggacctatattaaaggaaaccattccacgccagggaagttggatgcagaaataaacagaaataagctggagaagaaggtgcttagtgggctccatctgtatagcgtgtttgcccctcagccagcctgctcagaaagatgaactgacttgctttagtgtgagagacacgattgggtgctatccattcttaacattttggaaagagcattctgggatcgcagctgcaggaggctgagctggtagtagattgggggagagtggagcataggagggcctgggaaggacagatttggacacagttctgtgcctggtcatgccatgctctgtgaaaaaaggaaggcaggaccaagaagcaggcaggctcctggagctattgctctggtcttggagtgaatttttgtggagctggccacactcacactcggtgagcgctgtggtggatgggcagtctttgcatgcagctgcccatggcaaaggctgctctctgccattctggaatagagacctgagccattccctgccccacgccagccctgaccccaactttctattgccaaaattcatatgaggactgagccttggtccctcagtaggctcagtatcaaggtccctttggattaggacaacctgaggaagaatggtgtagaatccacctcagggagaggatggttacagattccttaagcctggaaggaaggcactgaagaggacttgaggacaggaaactcttttaaagggacgtggcatttccagagagaaagggtgcgtgagagacatcttctgtgtccatgagtacagctagaagtcatttaaaataacctgtcttgagtggaggaggctccttgaccagagttagaaacagagatgtaaagaggaagatgagctccccgcagagtggagactgcctcctcccaggcgacagggcctggtttgcccaagttaagtccctgtgtctttgtgagcagagaggtctccagcttgctttctggggcttactttgaaccaaagtgagatttccaagacagtaactggctgtaagatatgaccttacaacgttaaatccagcccagtaatagagaccgcatgggttcttttcctccagaaaattccgtgatctgtgtatgttcactcggccaatacttgtgagcaggacgggctgccaggctctctgctttgtacaaggatgccacggggggaggagacagatgaggaccctgccccaaggagctcacttacattaaaggggagggaggtagaccaaaacaaacatcagggaaacacagaagagacttaaacattaagacaggtgttctctgagggctagaggcaggatgataggctggtggtaactaggggagatatttcagctgagaggataggggatcagaatgagttaggcctacaaagagctggggaaaggagcttctcagtagaggcacagatatgcagaagctgaaaagtacttataatgttcagaaaagaaaaaggaggctgtgtgaggccagtgtggaggtatagtgagtggaggaaggtaaactcagctcaggcatgacttggtgggccaggggaagctaaggatatagatagggttataggtagccacacttacctatagactgtatgcagacaagaagaaagttgagtaggtcagtttatggttttgcaggttttatgatgagacatgatggtggcttagggacagggagactggaattagcacctgctatgctttggatgtctgtcccttccaaaattcatgctgaaatttagttgccattataacaatattgataagtggaccctttgggaggtgattaggccatgaggtctctgctttcatggatgggattaatgctgctataaaagaatgagtttggctcctttgtgcctctctttgcctttctaccttcctccatataatgatgcagcaagaaggctcttgcccgatgctgatatcttcattgtgtacttcccagtctccagaatggtgaaaaaataaatttctgtttatcataaattatccagtcttaggtattctgtcgtagcagcacaaaacagactaaaacagcacttacatggagttgtgcaaccgaacagcttctgtgaatcaggaactcaggcagagaactcggcctgcgttcgtgttcctatctcctcagcttcaacttacatcactggcctttgctatttgaaatctggatttctggagtcaaacataactcatctcgaatcctgcttcagcaactaactagcaagctgcccttgagtcgaagggctactgttgacctaagacgtaatggatgtaaaataggtagcagctggcctcctgcctgatcctgacagccaccattcatttagatccatgagtatttctcttttaaaccaaacgtaggcttctttagcatccttaggataggttgacagttggctttggttcccttttctttcctgggagcatgactctgctgttcacataagcttctcttgtgatcctccctgcattctcttcacaccaatgttgcccagatgaaggggccacattgaggggagaagtgggctgcctgttctcccctcacacagcaggccctaggcttcctctctccctgcacgagtacatgtggccaggctagaacagagagcaccctgcctcacctcagagaacactgacctcccttcccatccattttaaataactggcagttcagcattgcttcctatgggaaccagcacagtaggattgggtccctatagcttaacatacagcacagactgtggaaataactcaatggaggtgaggtcatctgagttgacatcccagttctgcccataactccatgacgtccaacaagtcacttgactttcccgtacatcttcttccgtatctattcggggttcagccatctgttacctactacatgccagcactgacaatctaggattctgcattgagttctattttaatgcccctggaggtggtgttttttaagctcagatgtggatttttatagcactctgcatgtagggtgcctggcacctttaaaaataggaccactgccatggatgtcgaggaatagcgggagaggttccttgtgagtcatctgacagagacacttggggaacattgagaaaggcttggcatcactgctcagaaggagtggctgtcttcccaccttgaatttggatctgaaatataagcaaatgctcctgccatggtggctgctggcagctggcactcttggtgcccagatggagatttccagctgagcctggctctagaaggagcccaaactgaggcagcctgtgatacccctgtccagtggggaccaggtagaggggaaaacaggtggatcatgagttgctgatctgacccctgccaaggcttcctattcttaaccagatccagggcccatcacaactggaaggaccatcacaactggaaggaccatctaactgggtctcacaattgggaagagcatccaagttagacatttcatactgtttctgagctacaatcataggagtgaaagaagacatttatcccccaagtttaagcctgtgtcctattattgactacagtacttatagtacatttgcaaattattttcatacattctatatttatgaaattgtgtcatttgaagcaacatggataagactggcggtcgttatcttaggtgaaataagccaggcacaaaaagacagatattgcatttctcatttatatgtgggagctaaaatatttgaacacatggaaaaatagtggaaaaatagataacagaggctaggaagggtgagtggggggaaaggggaaggacgaagggaagtagcttaaagggtacaaacatacagaaagatagaaggaattcattcaatgtttgatagcagagttggatgactgtacttaaaaaatgcattgtactcagatgttagacaccttaaatgccctgatttgatcatcacacattgtatacattaaaaaatttatcatgtaccccataaatttgcacaaataaaaaattgtgtaattatctgtgattaggacaattgtatctcactgtgtataataaaacaccactttgtaaatatagacatataaaatattctccagttttcataaccttgttttggcatttcttaattattgttaacctgttgggaaccttaaaatatatgagtagccaatctttttttttttcaccttataggccaaatctcagctctatgccttttttccctcactctgttagattcaaacagtgacgaagaaagtcctggttgcaccaccgccggacgaggaggccaacgcaaccagcgctgttgtctctctgttgaacgagactgtgactgaggtgccggaggagactaagatggttatcaagaagggcctggagttcaaggatgggatgaacgtcttaggtaggccagctggtggtccgggattctgcttccctggcaatggctgggctatcctgcactcccttttcagaaaactgatgactcagctgtcctctaggtggagcaggaggctctctctggggagcaatttgagggtcactgggactgagagctgagcgatttaaggaagagagagaagggcagaggagaccataaggggacagggcagcaagaagctgggtatgggaaaaaaggagggagctcaccgtcattgggcacattccctgactctctgtgtggtgttagaaagtcactttctctgactctctgtgttattaagtgacacatccattgctttcgtttcttaagcattttttaaaagctgcccccatgtactggtgctgtgctaggtgcgggggctggaccaccacagcccttagtctgcaaacaaatgcaatgctaccaggattgtaaagtgttggagtaggtaccaagggagctttacagattatcttgttatcttgttttactttctgggatcccagtgagccctttctcctagcccagtaccttcttagcatgccatcctagaggtttttgggctctgcagttgggcagacctgggtttggatccagtatgggccacttactggttatctgaccctgggcaagttactccatttctctgagcctcatttgtaaaatggaaataggattggcatctattttgtagattactgtgaggatgaaatgtgattgtgcatatagggcacagtagcacatgccatgtgctctctccgtatgagctgtgatcattattcaaagtgggtggagagctgaggagttcagtaagaaaatacctccatgagggacagaggtttattaccatgtgagcggctctagtctgcccagtttgctcccctcccactcagtgggtccactcccttccgtaacctccatccatcactagaatggtgtccccgagacaggaaataggggcatttggccaaaacctgggagaaatggtgaatctggatggatgaagtatgtttatttatccaagcacaatttctaaaggtttggatgacagctacttagagatgaatgagctcagtagtcctttcacgttgtcatctgaaagatcacatggccttgtctccttagttgggttgtcagataaaatacagaatgcctggataaatttgaattttagataaaaagcaaatagttttttagtgtaagtcacaaatattgcatgggacataataatactaaaaaaaaagtattcattttttacctgaaattcaaaaagtaattgagtgtcatgtttgtttgtttgttccaaatttggtaagcctactccttagccatctagaatggtagagagaaagaggagagagagggagcagaattgcacagtcactgagaagcagaagcagatcttttttgtttggcttggcaggaagcaggttggatgagtgagagtgagggaagagatgagctgactaggttgctgggcaatggaagatcaataaacattgtttaacaaccagtgggaggtgagaggtggaaggagcgaggagtaggaaggagagttcctctggggagattttgcaaatatccccagcacccaccaccgagcagctcttctccctcactgtccagctatctatgttcctttcaggtccttcctaactcccccatggtcttttctggtgggtcataacttaaaacacccaacccccttttgtcaaagtgttcctcagtcttctccatactcaggaggagcttgaggccatgaacaatggggccagggctttggagtgaatcattcaaagactttcctggttgtttccagagtcttggtggattctgggaagtcacaggacctttggctctactggggagtttcaacacaactcactactctgtaaccccagcggccaagtccaagagggttttgttcagatgcaacacccccgttccagtgagcaatttcaattaggcaatgtttacaaagaaaaattacaagctgaatacggtttccatccaagtgcagatcaaggctctggaaagccaagggaagttagactgttgagaaacttcccatttacaaatcatggctgaaataaggttctttccacggtcttctgagggtggagatagtggcttttttatttgtttgttttgctgtctttctgttttttggctttggaaagtcccgaggattaagcacttgcaataagtgaagatacaaccccagctcttgcctcccacttctttaaggaacatttctctcctaaaaaacctccagaaacaattctggtctccaccctctcccaactgcttaaatcaactccaactgttcctttaaaaacctatctctcatagatatggccagtttctgctgacactgaatggagctttttttattccagttctttgggaccttgatacctcgggcattttctcttaatttcaaatgaaattaaccaagtaatatgagctattctcagccagaatattcagattgattctctttgacctcccacgtagcagactcctctccatgggcttgagagaaggacttgggaatggcctgaaattgattttgtacattactgcggaactagttccctctgtcctggatctaatcttccctaagcctttgtctttccagaccaataacttacttgtgaagtcatttgtcaagctttctagctgagagcaaaaagaggagatactaaatgtgaagtattagtaaccccaagtgcaagtgatggattctttttgctgaagatagaaaggatccagcaaagggtagttagacaatctgggttgatatgtgcttggtgtaaagaggttagtgggttagatgactagggaaagagtaaagtcaaaggttcagagagaaggaattttgttataagagaatcaaattataatgctaaaatttactgagtatgggttaagactttaggcataactggacaccataggaaactggatataatagggagggactggaaattaggactgccaaattgagcaggttaggtgtggagaagaggaggaaagagaagatggctcatacttcagagtcagagaacaagtcaggtggggaagcaaagtcctgtagccaaggacatagcaacactgatttatagaacatgtaagtagtaagaactgagacctcaagaatggcaatactagatcaggggtcagaggtcagggagcacatggggattggaaattagaaatccagatagcccccaggcagtactggaaacacctgtaagccgcacaatgtgccccagtccctggatgcgttggagtgagactgcaggcctgagcgtgaggtaccgagggagagaatggaagggaccaacaggagtggtaggaagagcaaagccaggcctagccttggaggaactaaagtgtagggcagattcccaggatctcaggcacaggggatgaggtaaagccaacacagaagtaagactcatggttgggtattggagttggtccaagacctagtgcaatgtgatgctgacatgaagagggcagagatgaagctccttaaatctttcctggggttaggattgaccccaaaggctgatgtgaggctggacttagatacaagtcaagaatgtcaagtaaaggaagaaaagagtggagggactaggaactagcaaaatctgacagtgaatctatattctgtctttatgatcctgaaaaaataaataaaataaaaaaagcattctaaccatttcaatcatgaaaataattatgacaaattcataaataacagattacatttaaaaaaactggataaaatggaatttcggattccttattgttttccctttgatttttcagtatttttttctccctgtcattttatgtgtgtagtaataaaaaataattttacatataggattttgtaagagtgaaacataccagccatgcattgatttgggataataccaaaacaagctagatgtaactctagcaaagaatttattggctaattggcctctgctattccaatattggctccaaagtttgtatgataatccccaagtcccaacaggcttttcctcgttaatctgtgtaataaaggaatctgcttacacatgatttcataagtgaggggagggaaaagagagcaccttttagtttggaatgaaaatgaatacattttcttcaaggacctaatgctgcttacagtttaacttgctcatgtggaaagtgttcaagaaatccaaaattatccaggggaaagttacattcagtatcaaatataatgctttgttcttttaatgtctaattcatagggtaaccagcagtgagaacatggctccatacattgggaatggtaaagaatgagggagaaaaagtacattttttgtaatttgtccttctatgtaatgtgattcatccaacaggtctgatagggtttttcattgcttttggcatcgctatggggaagatgggagatcaggccaagctgatggtggatttcttcaacattttgaatgagattgtaatgaagttagtgatcatgatcatgtggtaagtggccttgttcttacttcttagcagtgggttgagaaagccttggggtccccagaggatactggagctctccctgcaggaaaaagttggcatgggctgatcaaatgtctttccagaaagactttgagaaagggatgaaaatatcttttttggagcttcccctagaacaagtgtagacaaattatgccccttgggccaaatctaacctactctctcttttatatggccagcgagttgagaatgggttgtatatttttatgtaactgtcttagttgggttgccataacaaaataccaaagactgagtggcttagaaacaacagaaatttctttcttatggttctggaggctggaagttcaagatcagggtgccagtatggttgggtctgataaggggccttttccaggttgcagaccaacttctcattgtatccacagttagaaagatatttatttatttttatttgaattttattctattgtaatttttttgagacagggtctgactctatcacccagactggagtgcagtggtgtgatcatggctcatcgcaggctcggcctccctcactgtagctcaagtgatcctcccacctcagcccctcaagtagctggaactacaggtgcacactaccatgcccagctaatttttgaaaattttttatagagacgaggatttcactatattacccaggctgatctcaaacttctgggctcaagtgatcttcccacctaggcctcccaaagtgctgggattataggcatgagccacctcgctcagcatgaaaagagattcagaaagctctctggggtctcttttacacagtcattgtctttccatctattataacaaaataccttagactgggtaatttataaacaataggaatttattgctcacccttctggaggctggcaagtccaagatcaaggtactagcagatttggtatctgtggagggcctattcctcgtagttggcacctttgtgtgtgctctcacatggtagaaagggaaaacaggctccctcgagcatcttttattaagagcactaattccattgaagagggcacagccctcatcacctaatcatctcccagatggttcacctcttaacaccactgccctgggaattaagtttcaacataagaatttgggggacatatgaattcaacttatgaattgcagtttttgccattactttcaatgggaaaaaccacagttacttttgcaccaacctaataattaacttgcctaagatgattatagctagggagaggaagagctgtagttcatattggtatcaaaacccttgatgcataagcaggtaggttttttggtttggatcgtctaagcaatattgtttcccctttatttcacatgtgtttatagtcagtgactctgaaatctaggggagcctaggagagcatgagtatctattctctcattgtggaagctctgtcatcttcaatcattggaaacttttggtgtcccatatccatcagacagaaagctttttacttgcatttgtttcagatctctaggatggtcctgtatgtctgcctagaaaaaaataaaaccactcttagaccaagtcatacctgtgttctcttttccacaggaattctgggttacctattccccatctctgcatgttccaggcctacccaccttctttgccaaacttcttctgatccttttccacttttctgtaggtgtctttcgtggaaattccagctgctttttctcttcctccttttcttgtctcccaccccacctcacaagggcaaaaatctgttcttttttatctccacagaaccaaacatggtgatgtgcctgtagtcaattgttactaaaactttaggaacgagtgggatagctgataactccaagatttcagatcaagaagatgctcctcactatttcatgaaccatatttaacagacctggcttgttcagatcattgttttacggtgcttttaaaacacagaaaggatgctagtgaaataacatcatgttctcttttatgattgtactgaaccctcagcttctcaggcaatgctagatttctggatatttctgttgtatgaagatttgggaatatggtggtgttgtaaaatatatatatatatatgtatatatatatacacacacacacacacacacagagagagagagagagagagacaaagactcgccctgttgccaggctggagtgcaatggcacgatctcagctcactgcaacctccgcctcccgggttcaagtgatttttctgcctcagccttccaagtagctgggattacaggtgtgcaccaccatgcccggctaattttttgtatctttagtagagatagggtttcaccatgttggccaggctggtcttgaattcctgaccttatgatccgcctgccttggcctcccaaagtactgggattacaggcatgagccaccgcatccaaatgtaaaacatattttttaagtccttcagattcatctgagtctgtcgagactttagtacacaatgcagaataagtctcttgcttaaacattaggattttccattgtttcctagaatttctagcagattacgcatctttacgccaaacatgcagcccgtatttctgtaatatgatgccaataacatgggcaatgtatgtgtccttcctatgtccataccaatgtgatttccactaaacccttgcaggaaagggaatcttctaggacatcagatgagtctgtgggatgaagtgtagcctcccttctccccagagatggagggtggtggtatgaattaagaagtttcccattcactgaaaccagaactcctaaatacttattatcatcttgggaggtaaaaagtggttgtgaggcaggaataagaccttagaatgatttctgacagctgtttggttacctcatctaggctcatagtcaggacaatgtcacatgacatgagatgccaattctacacatttctttaattctttcactgcctcgtcagcatcagtatttgctaatgatgtgtgtaaaaaggttctggataaaacagtcaactactctttaactgacccctcaaagcttaaaaaaatcagaattcttttgtattcttttctatgtagcagttataatagtaataatagcagaatgtaacattgaaaagattataataattctttttattattaaattataaattagaattactaacttcttgctgtatgctcagtactatttcggttacagtacaggtactaacccatttattactgaggaaacaattattattaaataacttaaatttaccaaattcctgctaaatacttaatattattccaattgttttacatgcattagctcatttattcttcacaatagtactgaacaaaaataggtgcttttgttaacccatttaccaaatgagaaaactaagcacagaggttgacttgcccagtgttatggagctgtacggaagtgatacctacatcaatttctttttgacttcagactggattgaatccaggatcctcctattgcaagttgtgtgactttaggcaatttagacactctaagccccgatattctggtgtgtaaaatgggataattctagaatccaggccataggttgctgtgagaattaaggctgtgaccaacagtcatgaagcaccttctttgtgctgggaactgtctaagcactttacatggattagtattatagtaatagctgtttgctgttaccaatattatcatcaattcaatccatatcctttgtatctctgtgttcatgaattctttaagaaacctgaaaaccccttaatttttgtatgattttcgtatcctcattttcttaggtagttatttaaaacatttttttcaaaatttgaaaaacttaaacagaaagtaaaatgtttcataatctcacccctataaaaacataaagtgagaagtaaaatctctgcctactcttccaattcctttttccaataaaccaccatccatccacactgttaaataaaaaactattcaatgacacgtgttaaaacacagtaaggcagattttattcaggatcattgcaatgagcacagggaccacagcaacgggattttggagtgggggagagagattgggctcacttgcaagtacaacatgggtaagtgggaatttatagccatggagcaaggtgggggcagtggatgctcgggggtaaggagtattttggctaaaccaaccccacaggattctagctgaaggccacagggtgaccaaacatcgtccaggagaggatgaagaacctgatcagatttgagggtgatcagattttgaggatggaggttcttgctaacctgacttagatgagttttttgctaaaccggattttataaggaaggtttagcaaagagcccagaagaggccagaagaaggttcagacgcctaactgaagtttggtcaaacaaagaatctttgtcaatccatccattttttttttcattcaataaatattctattctgtgcaggcaatgattttaggtactggtgagataatggtgaataagacagagaaaggttctggcccttgtggagcttacattctaggaaagggagagagggaaagccaaaagggagcaaatggtagcaaattgtctttgtagcacttattattaattcgaatagtaataagtgccgtgcaatagcgagagatagtgatgggggtagaagtgatggcccacgtggtgctgtctggaaaggtgacctttaatgaagacctgcagagtgagccaagcaacctggtgaagaactgaggggagaatattccaagaggaagaagtggcagggaaagccttttgagggtcagaacaaaggtctagagaggctgcagtgtggttggtgaaagggggcaaaaggaagtcaagttggagaggtgggcaggaggcagatcctccagggtcctgcaggccaccttgatgggttggaatttcatttccttgcaaaaggaagtctctggaggaataataaacctggaggctatactaactgcttttcactctgtcttgatgaaaagttctaatccacaaatggtaacttttaacaaaaatcactctttgggtagctggaactcctatccctaaatggattgggaaagatgaagatttgtgatactttctgagcacagacagcacctttcagcaactcttggaatgtgtgtttagctctattgacaagctattggaaacgtgtgggacagaaccagaggtgctccacagcagggctgagaaagtccctcagcttacctccactccaagtgtctgtctcatcatctgtcccaggcctgaaagtcccaaatgaattattcgagtgggttaagacctcaaagatcctgaagtagttggagctaaggtaaatggtttccagaaggtcaccaagtaatatctgcgtttcatcagttgcagttaagatttttgtttcttgaaatactggttttcaaacagatcagaattacctggggagcttgtttaaaatataaatgccccaaggccagctccaggacattctgactccataggtatgtggtaagcccagggaatccaggtaagctcaggtaagcccagggtaagccagggaattgttaacaggaagctggtggtttctggcacccggacaccgactgaattctaggtagcttgcctgctgtagatgagtgtgtttgtggagccctgcgaggggcatcttaggctggcaagggctgaaagacaaagtaggtggaggctagaatggatacagtagtaagaaaaagactccacaggccagtcctggatgaatctgtggccctgaaaacagagaacaggaacagcctaagagcagcatgggagccattccctctccccaggctctccagccatgtccttctcatgtggaaaatggaccaacaatcactgggcattatttggcttcagaactctccgtggagccctcagcctctttatgcactttgatttgtggttttgattgctggcttcatctcagaagctttgagtggtggccttgggtgctgggcatttgcccatccttttccatggaatgttattttcaattaggtaattcattgatatggaaacccaggaacccagaagtcccagtttcggagtgaaggcctaagttgtttgttttaaaaatgggtgcagttggtcggccacacctataatcctagtgctctgggaggctgaggtgggaggtttgcttgaggctaggaatttgagaccagctgagcaaaatagtgagacctcctacaaaaataaaaataaacaaaaattagctgagaatggtggcaaacacctgtagtcttagctactcaggaggctgaggtgaaaggattgcttgagcccaggaggtcaaggttacagcaagcaatgatggtgccactgagctccagcctggctaacagagcaagactctgtctcaaaatataaaaataaaataaaaaataaataaaataaaaataggcacaagaaagtaatggccctgaaagacttcatagaacaaacgttcttaccttcttctacttaatgctcatcctattcccagagatcaaggtgtttggattagcaagggcttcttcttgccatatttataaaccctaacacttcactttctggcctttgattaacactctccatttacaatgggagctcatgcttttctcagctggctaagtgccccagaggtaaactgttacctctctctagtccatctgtctgtggcccaaatgcattctccaggagactctatagctagtctttttttggcaaagagccttgaaagcattttctctccattctacaaattgctcgtcccaggagagaaggaaaattgaatggcaccccaaacagcttatatttgtatttttctggacatctttaaagggtgcttggtgcttgggaaagaattgatctcttgttttatgaagataaatgctttttggctttataggaaggttcattctgcttatttacagtctcaatgaatgaagtgctggtccctgagactaccttgataatttataagatgtgactatggacacaccagcagaatataaaatggcgggagagctaagggtttaatgacatgagcacaggtttgtctcagactccctaatgtctagggaagcagtcctcagacttgaccagcctgcaccccacggaaaggaaaagtaggaccttcaggctagattctcatatgggaagagagcagctatgctaatgttagtttaactaatttgtgtcagttacagatcagttccttcaggattaggttcctcttgagagaatatgttgctataaaatcatcttgcaattgggtatcccatgagatgttctagaaagcatcactaactcaggcttactaagcatgagtgatgagaggacatggggtacatgtgtgaaaacagaacctacaaggaatgcctttgtcgggactcagagaattaatggtactgacagagatgcgagaggggtttttagcagcacacatatatgaatgctcaaaaatttaatccccacagcatctccatgaggttggagttagccgctctgagccttgacatacatatctgtaaaatgggaataagccactaaccatggtcacatattaataactaataagtggtgagacgagctccatgtcttatgtagtattcatatatatgtgtctcatctactcttcacattttttctttaatccaggaaagtgtttgctccaggcacaattgcaagtctgtatagatcttacaattacagcatcctttcctgactccctgacccctgctggaagccttatctagggacttcattctccccatagtctttctctcaagtatgttcataatttttaataaggtagcagccttcccataaatattttcatatcagccagaaactgtcacaggctgaacaaattcatgccctaacaacaccattctggataataaaggattttaccaaatatgggaagaatatattcaggttgagagagaaaatagctttcccaagagtgaggaccaaagtagtttccaaactctctataaattaataataagatagaactataacatcagtttatataagataaattggtatacgacaaactgcttatctacaaagagctgtgattattcactaaaaagaagtggcttgtcttggttgggaaaatcccccagttgggagtttcacagacctgagattgttttcatttcctggtttcctggtcttgggctgattatttagcttttcttaacctcagtttctttatttgccacgttgcaataatgacacctagattttcgggttgtggtaagcattaagtgagggaatgggtgtgcagctctcaccatagtgcttaaaacaaaatgaaagtagccagcattattgttagaataagtatggaaaaaagactttcagacttagaagtcataaaaccacttttctctaaatgtacattttggctcagatgatttccttgttctctctctctctctctctgtctctctctcatttcaatatattccctatcttcctaggtaagaacaatgcaaatttacaaattccagtttatagttttctaaaaagctcaaattcccaaatttctaggaaggaactgaggaacacaaatcaaacaagattcccagagacacacctgggtctctcaactttgaacttgatggtaaagataaagatggcaatgcatgtctctcctttattcctagaactcaccttagccacaaaatttgcctttggacttttcatcagagcaggcgccaccagatccacaaaacagattttggttaagggaagtggtccaaagtaaaaaataacatgaacttttctcagcaaaagtctttttttgtacagaagagccaagcgttttcctcagtgtgcggtacagaggaggcccaggttctgaatccctaatgatctcttcaatgctgtttttcccttttgtgtttttcaggtactctcccctgggtatcgcctgcctgatctgtggaaagatcattgcaatcaaggacttagaagtggttgctaggcaactggggatgtacatggtaacagtgatcataggcctcatcatccacgggggcatctttctccccttgatttactttgtagtgaccaggaaaaaccccttctccttttttgctggcattttccaagcttggatcactgccctgggcaccgcttccaggtagagaacaaaagaaatcacctttctctttgctcactcttttgccctctttgccatttctcatttctcaaaaccctcccatcacaaagttcaataagaacacttggcacacattactaagatcttttggaaaaggcgaatgatttgaatttttgtctccttctaggaacttctgagccttctggtgaacatttttgctggtttgcaactatattggaaatacgatctcacattaaatttttcagataaatgcatgctatttgtttgcatgcctaatttgccacttaaatcattagtttagttttagatgttttctaaagggagtgtaacaggatatttttcaataaacatttcacctgtgatttggaaaatgctatcacaaaatattactctttgaagattttggtaaatacattttcaaaagtaggagaagcagcttttacaaagtaaatggtatgttaggtgagactttttctaacaaaattcggccaagtctttgacctcgacacgaacctctaatggattatttttccccagagttaacttggcattgatgaagaatcagttccccctttgttacttagttccagtacctagaaagccaaagaggaccccagagatatgtagagaaaaatcattttttggactatcatcttggactgaatctaacaaaaacaaaccaaaaaatgaacaagaagaaatacataagaaacgtcttacaattaggctgggcgcagtagctcatgcttgtaatcccagcactttgggaggcctcggcaggcggatcacttgaagtcaggagttcgaggccagcctggctaacatggtgaaaccctgtctctactaaaaatacaaaaattagccaggtgcggtggggggcgcctataatcccagctattcggtagtctgtggcaggagaattgcttgaacctaggaggcagaggttgcagtgagctgagattgcatcactgcactctagtctgggtgacaaagtgaggctccatctgaaaaaaaaaaagaaagaaagaaagaaatgccttacaattgagaatttttaagactagtgttttactttcagcttgcaatcattgttttatttctgcacatatgtccttgggtcacaaaactaagactgaatcataaaacaggtggcagggaggcaagcaaattctgaaacccatagctcatcattcaggtccttgttgcagaacctgtgcccatgcaatgctagggaggtgccactgcatgacacagcagggcctgttgctccacggctactgagcagtcagtcaggtttcccttaagcgacctaacagaccaataatgccaaccacctgggaagccaaataaaacttccatcttgcaaatcaatgaggattcagtgctagtagaaaatggagtttcagacaaagctggaatatatacaatcttaagggtctagattctttacccagtttccgaagatgaaggaaaacacttcaaaatttccttcttgatttataaattttccatgactaagtatctctatccatacagatcttcacttgaagaaaaagagagaaaaaaaaaaaacccaacctggtttaattttatttttgttttctggttataagcctggtatctcatactttatctcataccaggctcataaccagaaaacaaaaataaaataaaatttctgcaggctcaatgtgaaaaagttcaggcagtgaatacaattttgaagaagaaaatgagctttgccaattattctatcacccagtgataactggtcataaccttttaattagtctttagttatatatctttcaagttcttactatgtatgtatatattgttttataaatagttatttttttactggtcaacgtatcataaaagttgtatctattgcaagagactttactaccattttttaaactgcataataatgcactgtatgtactacaatgcaaaccccaccctgtcctagccacagtgatgtatatttaaggcatgtctattaaacagggctgtgacaaacatccttacaaatacatctctgcaaggttgtatgatgatcccctcaggataagtggaatttcagagtcaaatggtatgcacattgacagttttgaagcacattaccagattgctattcagaaaaatgtattattttatgttcccattaactggggtttgagggtgtgcccatccctgcttgcttaccagctctggatattgccagtcactttaatgctttccagtcctattgggtgaaaagtaatctcatgggatatgcatatctttacttctccttcccctcccctttcgcctgccttgtgaattgttcatgaacttggtcattttcctgttgaggtattcgtcccttcctgattgattttcaagctctctttttgtataagaatattagctcatgtgtcacaagttgcaaataatcctcctcttcacttgacatttgtcttaaaaatttactgtgctttttgcctctagaagttttaaatttgtacttagtcaaagctatcaatacttttctttagaatttagaatttagattttgcttaggaatagcttctccaagttaatacaatatgactttttattttcttccaatacctttatggtttagatctttcaactatttcaaaaatattagtattattttcttttgaatgactagaacattatttcagtaactttataagacaaggtgaatcttaaggggatttgcatggcccaaatttgtatttaaatcagagacaaatgctcagattatccaaccaaggctgctaatattagaccaatttcttcccctaactctgtatttcatttgaaaaaaaaaaagtggttttaatctttagttaaaatgtggtttttgcctggatgtggaatttctttttttaaaaggccatgtggcgtgagtcatgtaccgagaattaactgaaggtttctttgccatcatggtcacagagaagaaaaaaaaaaatgtaaaacccagggacagcccacaaaatatccttcctgcctcctcggcccttgtacagaataaagacgttgagggtagttgaacatcttttctcaatggttccagaggctggtgtcagggaggacagagggagtggggtggcctgagactgacctgtcttcagccctccaacttcagtgcagtctgttaaaactaatacgtaaaaaacaaaagaagcatttcaaatatctgacagttattattagcaacatttgaaggctgtcatatggccattgaggcaggaaccaaaaaagcaatgtcagcatgtcagcccatccacacaggaaagcttgaaattaaaattctcaagtcctagtttgattgggtgggtgggttttttaagacaaaaagcctgtccagtagagaaatagaggatatttttatacttaccaatcatttttcccagtcgacttaattgtccaaagaccatttgatgacattttggaaaaatgaatgcaataataaacataaatgtatgccagcaattcctagtttgattgggtgggtgggttttttaagacaaaaagcctgtccagtagagaaatagaggatatttttatacttaccaatcatttttcccagtcgacttaattgtccaaagaccatttgatgacattttggaaaaatgaatgcaataataaacataaatgtatgccagcaattccagaagtatccttagatttgagaatgcttgcaatcgagaatcctggccaccaaccacaactgagcagtcatctcataccagtcctggtgtcctggcaacccttcgaaagggcccaggaaagggtggggtaagaggaagaaagggacactgacttctcattaagatagcaagctaggtctgatgccatcccctgcatgcaaatgaggccaggctccaactttgccctgggtttgcaagattttagttatgagatgtcccccaacaaacaattcttcttcctaccccagaccaagaaggaggcatgagacagacccctgacttgaaatcacaaagaatgttctggtaagagaaatctggctctcctaaggttgttttaggagctcgtgggccagtggtttgataagatgcacatctcgcatccctagttttagggcttctgattcgttggttctggataggccctggaatcttcatttcatttagcttccctggagcagatggtcttctcccactctttgagaaactaagacctctacagggatctatgtccagtttggtcactaattctgaccagtagaaggaggaaactttgacaaaagctgtaagtgcaagagagaaaacacctccaaatgttatctgcattgcaggttttctaattcactttgctaaagtttgaatagaaaaaaatcaagaggatggaccatgaagcacttccatggcagtttgagtgttctgcattgctttctacattacttaaactttgcagcaaatccactcaccctcccaggcacttctatccacatggaaataatattctggcctttagcaacccttactgtttattggtctccaattttgaagacatatgaacgtgtcaggaattctggccttcgaggcttggtcatgtggtcacgaatccacatcccaggcctgggaggagtgggggtgaagtcccttcatatttagtctttgatttgctaatgagcacatgctttcctgctccatgtcattgaagtgactgtagaattggccgatgagcatatatcagggtgttggactatctgtgaggttccccagtgaattgcttgaagctcaggttcatgctgaagtgtgctggacatgtttgttgttatggaaattagcaagtccagctcaggacaatttcccagggctaaatgcaatccattcagtcattttatcggaaacagcatttctagcatgaaattatgggttattcaaaaattcctcatcccattttgctgttgatagctgattcttttctgacatagctggcttttgtttttttttttttgcaacccaattaatatgggcaatcagatgcacttcaatatcgaatccaaggtggaaacagtggccaaaagaaaaaatcttcaagctctgagtatatctccaaaaccagaaccaatgaaaatattttgctgcctattagtgtcttaataagattgaatttgagcctccaactcacgagtttttaatctggctccagatactgcttttttgcatgtcacattgcttgattgacacaaaacaagaaaaactaaggatgcagtggcattccagtttatgcattgtcctgcttctctaaagtggacataaccctgtctctctctttctctttgttctcagtgctggaactttgcctgtcacctttcgttgcctggaagaaaatctggggattgataagcgtgtgactagattcgtccttcctgttggagcaaccattaacatggatggtacagccctttatgaagcggtagccgccatctttatagcccaaatgaatggtgttgtcctggatggaggacagattgtgactgtaaggtgagaagggtggggtaaaacacaaaacaacctctaccctgtttcccctccacactaactccatgtgacagaggccacttgaatttcatttctgctggtggaagacaatgaaggtaataaaaaaagagaaactattggcagccttcaaaaggaaaagattgtgacaagaaagaagactcttattaatacctcctgtttgtattgcacatgtcaacttgctttagaaattggatattatttgatttttagcaatcctgtgatggaagcagggtaatttctttgcccatttaatagacaaagaaactcaggcaccaagaggcatggtagtttgtccatggctacagcatggctgtaagtgaggccaacatcagtaatgatttggcaggactgtaactgaggccaacatcagctgactctggatccaatttttgtttcactgaaatatgctcccttcaatattccatcaccagagggtaatggcagaaattacaaaatactggaagagattcctcaatatgacatataagattttattacaaataaatagcacatagttttgtttttactaaagctatttttatttaaatgtattcatcattttaaaaattcagaaagaacattttcctaagagattgttaaaaatgcattgcctcaccataaacttaaagatcacacctactagccaagccaacactctgtttcttgcttataggttaagtcattgaaaatatcagtcttcagcccattcaatgttatattgacattacagcatgaaataaagctttttgcaatcatctttttaatattatcactcccaacccatctaaatgcttcaattaagccagaagccaatttctgccttatgtcatatccctactctcagtctcaatttcctcatctataaataaggaaggtattcataatttggggctaaaagttggtagttcatggatggactcccagcccagagtgttgctttgtttgccttgaaatatattgtaaaagattagaatttcatcctcttatgagacagctgcccttcagtttcccacagtctcccctgctccctattacttatgcctggcctgctgcacctgtcaccacagcttagccctttaagacaacggagtttgtcaatcttggactcaacaatttataagttttatttcccctctcagattctatgtgatcagaaaacatagggagtaagtgggtaacattctgtgtgacagatgtacttgtagtagaaagagaattccagatattagaacagccaaggcctgggtgattcactttaggaaatgaatgaggtagacactggaatacactttcatcctccatgatgataatcactccactctttggttcctctgagatggcggactctttccatacattgctttgaacatgcccagcagtcctgaagagaaggaatagtcattattcccattttacagaggaggcatgtgaggctcaaagaaattatctgacaaacctaggtctcatggctatgggtgccagaggcacaagtcaaatttctattccacagtttacctcttccaaccacaggtcatttcttctttctgactgtgactcaaaaaaagacattagaatagtgtttttattgactttttccattgggcattagaaggggcaatagtttttgggttcaggctaaggcactagcctctttctcccacttcaaaccccgggcagcactgtcaatctctatattagaaactttggtaataatctggtgtctgcttggttcatgttattcaacagcccattctctggtaggcctttagtgggctaaggccattttaggagatctctcctaagaggcagtgttcatttgggtctgatgtctctacatgctcaggctttttaaaagtccaagctcagggaccacccagtgtctgtagcagtgctggaaatttgctctaatcatgtcctctatgtgttctaggggctgatattgccatggaatggccacttcagagcctttgcttgatctatctagctctgaggtattcaaccagctcaaggacatttttgttaaaacacagctttctcctctctccttctaaccattccagaagatttagtgaatatcccatatgcatctgagttcactttagcaactcagtcagcaaatagagaaaagaaaaaattcaccatgtttaatacacacacacacacacacacacacacaatatgaaaacatgaaataacaatcacatttatttaatcagctagaatgtatcatctgaaatgtctcccagtggttctcttgctaaattatctcaccttatacatagataaggaaacagaggctcagagaatagatcacacacagccgtctagaggaacaactataatttaagtttccaaatgctggcatatgcttccatttatttaacttgtgatcctagaaacagccctacaaagtagatattgggttctatattttacagatggagaaaatgaggcacagtaagttgaggtaactgggccagaatcatgctgtttgtaacaggcagaaatgggatttgaacccaggccaccttactctggggtttgtgtttttaaccattacacacactgcctccactatactatactgttgggttgcaaaataataatttatatatatatatatatatatatataataaaatcttcacaaccaccctatgaattatatactataagggagcctcagtttcctcatctgcgtaatgggaacaataacaaattctagggtggctgagaacatggtgcctggcttatagtctcttatgagtatgagccaggcaccagtcaataaatgttagcttctattattattattgatgtctaataaaatacacaatactcctagaatattaaagaaaaatgtggctgtgacatcatgagtaccatgatgttactgacaatggaaaatatacttcaggtcagaagatcaagcctttcaaaattatgtcctaacagatatcacgagactactaacctcccttgctttaaaactcaaagatgaaaagggcttcttaagcaagtcttttgccaagcaaaggtaatttctggtatctcgactcttggtcttgatggtaaccatattttccattaagttcccactattagatgggaacttacagatgggagaatggaccagtgagtgattgaatttgtgcttaaattctataaatttatctacacagggtttgttttatattaactgatactactgagcattttcacttgacaaaagatgagtttgaccatatgcatttaaatctctggcccctgggtgggttcagtcaaatcctcctaaattgtagacaccacaagggctacctctggggcacccaccacgggtgtatatacttcatgcctgcagtttgtttggaggaaaatagccaaatctatcttcaggctgcgcttccaagtaaaattttcatttctctcctttcactgcatgtaggaaaatagtgattagaaattcttagcatttttattaattcatagaattttcagtgtagggagggatcaaggccatcaaggacaagtgtggcattgaaatcaagcagaccagtgttcaaatcccagcagaccatgttcaagctgtgtgacctaagtttctccacccatcctatctgtgttttcctcacggtgaaagcaggtgttaccatatatgtcccttgcagggttactgtgaggttctgctctgatattgtgtgtctagtatcttaacagcttccaggaaccctagagaagtgagccaggggagtggaaggccaggcaaagcagaaggcaatgagggatgcagggaaaatcactgcccaagaagctcttgcagggcttagaattccacacacagagacagtgcctaccggagggtgagggtattattagggacaagaggggaaagcaacttccaggaagaattatctttctaagactttgtctcacacaaccaaaggataaccagataatgttaatgttaaccacagtgcaaagggatgtgcaagagtgactcagagcaactgatgctgtgtataaaacagtcaaggtcaagactgttggaacttggggagttccccttccctggtgttctgtctgtttgggaaacagttgagaattcccatcttccagctttcagggctttagggaagttttcattgcaaagcagcctggtcctgtccagatttcttgataagaaaaacaattcacattcactgggcatggtgggggtgggggagttgcaatgtgcccagcctcttgtaagtgcattttaatttattagctcctgaaagcttctgaccaccccatgagagagataccattactatctcctttttacagatgaggaagtcaaggcacagggaggttaagttgcctgtagtcatgtggttaagtggcagagctggaatttgaactcaggttgttcaactgcagaactttcacggctgagcactccacactgtacctcctgtgacccagatggattcaaggaaattggagtgctctgagccttgacaccatggacggggaggggaagggtgtggttggggggtctgtagatcacacccagggcaagtgtctatgcaaggatgggcctaaacctgggaatgatggcaataggggaaaaaacagctcaaaccacaggctctccaggggccttaatcttccaaacgtaagattaggtatattcagcaataagaccccaggattctgtgcttggtcaactgatggcctggatttagttgaaacaatttgagaggctgcctctcagctcataaaatttctagtattttataactacaaagaaagcagtcccccttaccttttggcacccacaaaaacaacttgggaatccatatttccaaagtactcttggatattttgatatgacattttgatatgacagctttgtacaaatggcatctagaaaagaggaaaaagagtcactgccctttgccagaccacagagactccctggtgtcaggacagggcacttgaactccagattaaccctctcccagagacaaacttcaaaacggtgctgggtgtggccctggcattgcttggaaagaactgatgagatgcttcagaaagaaagccttcctttctttcattatcatttcttggcatcccctttctgaataatgtattttccagcccatggtgaggcatccaggcgcctgacgcttagtgtcatttggaatctgttgatttgtttccctgatgtccaactcagttgggtctggatatttgctattctgagttctcatgttaaccttggcaatggccttcttagacccttgccacatagtccaaaagcctctggtgctcacagagacataaaagcgtaagcagaaatgaatgcagttgtgttcccatgggaggattaagggtgatttgtttttatctttaatatttccttgcctgcttttagagccacgcttgccttatttgagccctgtgatatattagactaaccggatagcatcatgggaataaggctccagtccatgaatttataagcttacatcatagttgagcagtacccaaataggccttaatccttaattccttggtcttagtactttagatttctctattccttggtggagagtatggggtgggggttgggggatgaattttatggctgcaggaaaattagagcttaaaattgccagggttggttttgctaagattctttccatttccatgacctgaacttctctgttctcatagcctcacagccaccctggcaagcgtcggcgcggccagtatccccagtgccgggctggtcaccatgctcctcattctgacagccgtgggcctgccaacagaggacatcagcctgctggtggctgtggactggctgctgtaagtgtctgtggatggggttctgctgggactgtgagtactgcctcctagggatgcacaggtggcaaggttgcaaccaagatcttagctaatccccatggcaactccctcactcttccttcctccttcccgctcacatttactgaggacctatttgagaaccaaagaagaaaaagatgaaatatttgaaggcgtcacagtctagtggaggaatcagagagattatgacacaaggttaaaagtacagtaataaggaaccagctactgatgcattcaaagaatctcagaacattatattgaatgaatagagccagaaacaaaggagtatgtactgtatgattccatttatatgaagctctaagaaaagacgatgtaccacatatcaatagaaagagatcagttggggctgggtgcggtggctcatgcctgtaatcccagcacttgtggaggccgaggcaggtggatcatctgaggttaggagttcaagaccagcctggccaacatggtgagaccccatctctactaaaaatacaaaaaattagctgggcgtggtggcatgtgcctataatcccaactactcaagaggcggaggcaggagaattgcttaaactcgggaggcggaggtcgcagtgagctgagactgtgccactgccctctagcctaggggacagagtgcgactctgcctaagaaaaaaaaagaaaaaagaaagagattagtggtttcttgggccaggtatagggggatagagattaactgggaaggaacacaaggaaacctttgggagtgacagaaatgttccatctgcacaggtatgcacaggtgtctacatttgtcaaaactcttcaaaacacacacttaaaatgggtacgttttgttgtatgtaaattatgcttcagtaaagtgattaaaacacagcacacacataaaagcatagtgatagagagaggccttcatcccagtcaagaatggaaggacagagcggagaatatcaagaaacatgaaagtggttactgaatttgagtgttcactaggttccagctactagactgagcactttacatcttcctctttaacaaccttgaaagttaaatgttattattcccactttatagatgaggacactgaggtttatagaggtaaagagacttagaaatggacagatattcgaccctaggtcaggctgcctctggagcctgacaaattcttgtttatggtcacattcaagcttctaaaggcagtggtagctgagctgaatcataaccaataggtaaaagtttctcaggtgtatgtagggagacggggagacaggacattccagtcaaggccagcctgcacaaaggcactgaggctaccagcagtgtgaggatgtacaagtggtctggtactcttggaggcagggcgtggtgaaaggtgagcaagacggacatcctcaaaggccatgcagagaaacttgaacttgaccatgtatggtagttcagctacctttcccagtgaaggacattttcctcatgtagaatactcactgcccattcacaaaggtgggaaagtctaaccagatggtcttcgacaagggggttggaatggatcccctctaagtgcccacttgggcttggatgttctgtgagatgtaatctgatgcctcctgtccagcactggagttaaatgatagggcctccggcaatgccagtcttcaatgtcagaggcacagagtgacaagtgctggcccagagtcccaaggccaaagtgcccacacttatttttcaaactgcctgacttgccagtagcaaattttctgacatttattggcattgattttaagagccagaaaccacatttttcttttttttcagatggagtcttgctctgttgcccaggatggagtgcagtggtgcgatcttggctcactgcaacctctgcctcctgggttcaagcatttctccggcctcagcctcctaagtagctgggactacaggcatgtgccaccacacccggctaatttttgtatttttagtagagacagggtttcactatgttggtcaggctggtctcaaactcctgacctcaagtgatcggcccacctcagcctcccacagtgctgagattacacgggtgagccactgtgcccagcctcagaagccacattttgtggacttgagtctgtttctgcttcccactcccacccttccaaagagaggaaaatgcaagtggccgaagggaggaaggacagctgggaaggctagaaagaagcctgacttctccataagatgtgcctgctgttggtgcagacaacagggcttaggttagaaataagaagtgcccagcactttgggaggctgaagcgggcagatcacctgaggtcgggagttcaagaccagcctgaacaacatggagaaaccccgtctctaccaaaaatgcaaaaataattagccaggtgtggtggcatatgcccgtaatcccagctacttgggaggctaaggcaggagaatcacttgaacctgggaggcggaggttgcagtgagctgagatcgtgccattgcactccagcctgggcaacaagagtgaaactccatctaaaaaaaaaaaaaaaaaaaacaaaaaaaaacagaagtaagaagtggctccctgaacagaatcagttcaacttgggagggctgcaaggaaggccatagattttcctgattggctccttcatcatcagaaaatgctcaggaaatacctttagcggaaggtgacaagcaaacaaaatagcctcatctctgtctctgccagtctctcaggtggtggtagtggcgtccctacctgctagcttggttattctctgtgtcctatattggccccaagggacagcctttctcatgacatctgttcagacaaggcagctgagagtcaatggtggtgtatgggtgagaaggattgtgagagaaggggatgaaggatacaaaggaatggggtaggccatggatggaagggggacaaaagggaaataaagacattggcagtggtctagagacagagcaaatagtagcagctcaataaatgtgagctactcttaaccacatagttgctgtgtgataattgggtccatccacatgaaaagaaagacgaaggaagccatttaagttctgctggctttccccatgacttgttgcttacttaaacccttgactctttgcctctcaagtcttttcaatgcttgtggtcattgagggtccctcgcctgctgtgacaatattgcctcatttttttcttgggcttatttccaaggctttaaaccaccattagaaattcatctttttaaaaaatattattatagaggctgccccccattataatacaaatgcctttgagtggaaaaaaatgcactaatatgatcaggagtgaggaaaaggggtgatatttggtgggtactgcaatgtctttacatctgtctccatttaatccttaaggtgccctatgctgtatttccagatgagaaaactgggaatcagaagggttgagtcttttgcctgatgcacagcagagcttgtatggccaggtcaggacacttcacccaactccacacagcctcctaatttgtactaagtgttctaacagtggggaggaggagcagagaggcccagagttggaacggttggagaagacacacttattagggccacccactgggctatggtttgaatatttgtccagtccaaaactcatgttgacgtttaattgccattgtaacaatattaagaggtgtggcctttaaaaggtgattatatcgtgaaggctccaccctcatgagtggggttggtgcattataaaagggtgaattcagccccttcttgccctctctttgtctttctgccttctgctatgtcatgatgcagaaagaaggcccttaccagataccagtttcttgatcttggatttcccaacctccagaattctgaggaaataaatttctgttctatataaattacccaatctcaagtattttgctatagcagcacagactaagacacacctgattctgcatgctaaccagagaaatatttttgacctatttttttcttctctcagcatgaaaataaaacaaataggctcaatgaggacaaatggggtacaatcaaggtcttggccacccttagaattcaagtcttccagccccagtgggtctgccattgtaggtcctggtccttggcagtcacttgttttcaagcctgttggatgtgagtcacttcatgaaacattcaaaaccctgcctacttctgacctaaatgttagcaaatgaaacaggagggctgggccctcccagatcaccccatgcaggtgctcacatgcttacacttgcaaaggaaagcagagcgtcctaactccagggctgaagtgtgtcagcagaagggagttggctgaatttttttttttttttaaaaaggatgatacatttggattaactatgttgatgaaatcatataatagaaaaccccatcctaggctggagctgggaagaaaggagcaaatgaagagctgttgtccagttctggggctctgatctcaaatggagggaggagtgtgatcaagggaaagagagtctaagaggcaggagccctcagtctgagctctgcacttactatctaaaggaccttgggcaagtgactttctgagcctcagctacatcatgtgtaaaatggggcaataacatatcaggttggaagcaagagtctaggttcaatgcctttgagtgcccttctagttttaagacctagagtagaattctgctggggatgaatgtttgtatacaaataagcacgagcattccttttaagaggaaaagaaaaaggaagggtagaggatcctgggaaaatgtgtgtagctgtttgtagctaggtcagatctgctttgaattagtaatggtggcacattctttctcaccagcaagaggagttctggaaactagctcttggttgtgagctctgtgactattgggtgctcattagtgtgtaagtggtggtgggggctaagatgagatggggtgcaactggccattccctagataagtagtctgtggaggaaaagcagagaaaaagaaaagggggaaacttcacctctttagccaaggtttgtaagctttcataactctagcaatttttcaatttaaaaccaaacaaagcctacagtgacatttaatgtgtcacagtgtttgccaactgctggagaccagccagcctcattactgccctctaagccctggatggttttcaacaggcaggcttagctgctctgtaaatgtcatggtgaaaaccaagattctggagccctgaaaaatgccgagtcccagagcactggatgggtgggactgtttaaaaccagaaccttcccctgggtccaggaagccctttgcgtcaggagcccttggcagatatttatgagaccttgctgacaccccagtgtctctgaaggaggcaggatggagtggtaaatgggagccaataccaggaagaggtaataaataactgtgtctggctacaggtaggaaaaggaaaatcaaaataaagtgaaatccgagtggacctatggcctaattctcacataagactctgctagtgagatcttttctgggctcacatgtgctaattggggaatatagttgagacggcacttagaaggaagacctcaaagagcctccaccctccaggagggctctgaagctcctcccaacagcattcctctctggagagaatagagcattcattctcaaactcgagcatgcaccaaaatctcccagagatatatctgaggtggggctggagaattgacatttctagcaagttcccaggtgattctgatgatgcaatctccagggactctcccttccagaagcaatgaactagagacggagaaggaaaacaggagtttctgattgtgggtatatgagcacctctacttttttttgagttaactcttgacagttgatgcatcctttcaaaaaaatagattgaaaagatacaggatgcaaatagctaatacttagtgagtgctccttaagtgttagatattgttctaagcactttacatgggctcgtttgaaagtcacagcagattatgaagcaactaatagtattatcattgttttacagttgagaaaacaggttcagagagaagtaacttatcccaatttagtggatattaactggctgaattggggttcaaacccagatgatctagatatccttgggtgttccaagcatgctcatctgagttctgctgttttaaaaatttgagacacacacatgcacatgcacacacacacacacacaaacttaactaactgaccctccactcatggctggtggaaaacaaaactaattcctacgttaaccttttctttgaagattttaggggcttatgtctatcttagtcttttgctttgatttcccacttccactgaattctcttttttacatcttatctccggtctacatcaacctccccatggaatgtggccccttttccactaagtcctttcctctctcaccaaagtttctctgacttgaggcagcataattgcagatcaaggcgggatggggcagggctatagttctgcgcagcaaaatcattttttgatatatcacaaaataaatgcatgttcatagcaaagggaaggacaaagttcaaaagagtaataaaatgaaaaagaagtcgtctccccttcatcgactgttgaatctcaagtgttatttcactgttaataatttcaggtagcacagacataaaataaaaatgtaatgttaggcatctccttttctaaaaaatcttttagtattccccacccctgggaatttccccttgggactccttgttctccatctttgaatatttccccagctctctggacacccctctccttttcatctgtaaagtaatctgagctctctgtgcctctctcctcatcctgctagatcatggcctgcatcctgactttttaccacgaaaatatctaaccagatgttttactaaacaaaaaccaattgtgtctctagagctaatctgctttcaagtcttaaattcacaatccatcctggtcctgccccttccacataccagcctccccattctcccctgcccagcctgtgccataagtaaatgaaacatagtctcagtcctcaaggagcttatagtctagtaatggggtcaagaaatcccaatggagcctcctaggtgcaaaaagaaatggataaggtgtagggaggaataaaagagaaaatgctctgatccccttttcacctggactaaaaatggtaatataatgagaagcttcttctgggtcatataagccttttatataaaacagccttggtggaggacctcttggttgacaagcactcaatacatgttagcagttattatcttctcaacatgcttgcaggtgagtatccctctccatatgttacgaatgagaaagctgagcaggacaggctaagaaatctttaatgcttgagctgggagtgtcatccaggctggtatccggacttcacgctcttagccaatgcttacgtggatctccttttcttccctaaccccatgtgactttagcccttgaatgcccagagctgtgccagccttcctcgggtttggggcctcaagtgacccctcttccacaccctgcccctaaagacagtcccttcgcaccatgcatcctgagaggcaggtgctatgttttgtttctatcaatattaagttgaaccatatgaaattgccaatatttgacctttttatatggaaataaatggcaatttcatatggttcaatccaatgcaagacaccagatgaattgtgggtgacagctccctcagccctgttcttctctgtgaaccaggagttccagacgatttcacatttccctgttggaggatttagactgagagatgaagatgagagagagtaccttggtacttgtttttctttcagtgaaccagacccagtgactcagtgtgaagtaactcggtcaagcccctctctcatttttggttcctggtgacctctaaagcatagccgtgtcatctgtagaaaacccatgaaatgcaagatctgctttcatcttcatccccttcttgcagtcctgacacacagcgtccagacccaaagatggtgtcacacactctaaaagttgtcttttaccaagccttaaagctcttgagggcaacgcgaaagacagggtttcctgagtggtgagggatgattgtgagagaaaatgaaactctgcctgtgaagaaactttccacacatgaaccacaaactcccatgtcctgccttgggccccagttaaacttccccagagttggtcagacattcccctggcagcctcaagggtgttctgccttgcagcattttcagaaaggaagacccatgcagagcagccatgacctacctcctggctgggcatcctgggaatcttcccagaatgccttgtggcagagaaacctggcatgagagggctctgtattctagtttaatccaaattgacagctttctgtttaacagatcccctttaacgtcctgccttctcacttagaaacctattttcataatcttaccttttactccttcccttctgtattgatggaatacagtccctccaccaaaggaaatggcctttatctccactctggacttccatcctctctgatctctctaggaacctaacttcatcaattattccctcttctctgtatcttcagttacttcttccccaccaacctcttctcattttgatttaaacatgttcaaatattctacctcttaaaacaaaacacaaatttgatctcctttccatttccatctgccatttcctctccttcctttctcaatcaatcatcttgaataagctgattatacataatgtctccatttcttcacttcactttccattttttacctatagtgagctggcttctatcactacctctgtattgaaactgctcttgccaggccaatagtgacctctttgttgttaaaaccaaaagaatcttcttttttaagatggagtctcgctctgttgcccaggctggagtgcagtggcgctatcatggctcactgcaaccttcgtctctcaggcccaagcgattctcccacctcagcctccagagcagctgggattacaggtgcacgacaccacacccggctaattttttgcatttttagtagagatggggtttcaccgtgctggccaggctgatctcaaacacctgacctcatgatccaccaacctcagcctcccagagaaacgtcttaccctcatctcacctgatccctagataataattagggttgtttgccatacccttattttgaagcatacttccatttacttacaaaatgacaaactcttctagtttcctttaacttttgcaggctcttatcttgcccattcattaaaagttggttgaccttagtgttccagcctagactgtctgctttttacactctgcattctctccaagggttaattaagcacctcggtggcatcctcagccttctctatgggatgagtcctattatcacctgcatcacagatgtgtctcctgaccatcagtctatattaccagccatctgtggggcatctgctcataactgagtcacatgcttcaccctcaacgtgtccaaaccaaagccagaatctttcccgctccaactgaccatgctccctacatatggttacattgtctactggttgcccaaaccagaaacctgagaggaatctttgactcttttttattccctataaccaatcagtcttcaagtcctataattctgtctcctgagtcttgctcaaatccatctttctccaaacccatcatatcctcactaactggatttcactctttcaggcttatgattttttagttcgttcttcacaatggaacaaacatgatcttttctttcaatggctcttcattacacttgagataaagactaactcctgaacttggctgataaggccatacatgatttggttaattcttactttctgcgtctctcactatacttgttagccatcctgaattcaactaagtgttcctacctcttagatttcatgcatattatttctttcctctctctatctcattttcttggacttatccttagggcccaactcaagacacttctacttaaagcttttcttatgacccaagtgtgatagtgttctacctacatgaccctgtagcactctgtactcatttctttttgaacatttatctcactctagtggaggaggtagacaaataaacagtacgtgggttcttggggaaaagggagtttaagaaggatttttgctgcctaagcaattggcatagtgcccttacacactctaagatgcttattaaacatctgttgaataaataaattcactaacaaagaactcaaactattagagttgatgttttcttctttctacttagctattaacaggtgtaagaaaaggaacattttcttgctcatgtatgcctgtaacctacaatgagtacttaaaggatgtctagtatttctcttattccgcttagtacaacctcctgtgaggttgggattagcctcattcccttgctcaggtgaaaagttatttgctcaaatgggaatcagaagccctgggttagtgttctcacccaaggtccagggccctttgcatcttgattttgcatcaaaagaataaaagcatcaatctgcttttattgttttttaaaaattcattttaaaatattctttcattcatttttgagacagagtcttgctctatggcccaggctggagtgcaatggcacaatcttgactcactgcagcctctgcctaccgggctcaaacgattctcctatctcagcctcccgagtagctgggattacaggcgtgcaccaccacgcctggctaatttttgtatttttagtagagactgggtttagtagagaccagggtggtcttgcactcctgacctcaagtaatccacccacctcagcctcccaaagtgctgggattgcaggcgtgagccactgcatccggccagtctgcttttattctatacaactctgtcttccatccattcctgtcttaatggctatttcattggccagagttctttttcaaattcaaggagatttgatggcatggaagagatgtggtggtaaaaagaaaaaatgtggggaaaacttactcagaaatcctattccaaaaacttggctgcttcagtggctgcttctggagagcaaggatttggtgtcaagggttgaagaagcagtcgtttgtaaacttatgtcaaccacttgagtggaaatggatgtgttaaactggaaaagtcattaaccctttagcataatattttgtgcttttgttcataacatggtgtgtgagtggagttatccccaaaaacggtaggacccagcacataatgagtgtcaaccataggctaggaactgaatttgtcttccccaaattctacaaaatattaatagttattttggctacatgagaaaaattatggttgagaaagtgtcttagtccattcagactgctataacaaaatactatagaccaggtaggtggcgtataaacagcaaaaatttatttcttacagttctgtggaggcttgaaagtccaagatcaaggcactgggagattctgtgtctggtgagggcctgcttcctcatagacagctatcttttcactctgcctcacatggtagaagggccaaggagtctctattgggcctcttttctgaggtcactgatcccattcatgaaggctccacccttgtgacctaatcacctcccaatggtcccatctccaaataccatcaccttggagatgattaggtttcgtcatatgaattttggggggatgcaaacgttcagatcacagcagtaagtcatccagatcacacagttagtaggtggctgagctagattcaaaatcagggctgtgtggttccagggtgcttctcaacatgtggcagatggtggattctggaatggtaccgcctgtgttcacatttgctgtatgactttactaggatgtcagactttgggaagccactaatctctccaggccttagttctgtcatctagtaaatacgaataatattacctcttcagagttacagtgagggttaataaggtagtatctataaagtatattctttgttttcttttctttctttctttttttttttttgaggcagagtcttgctcttgcccagactggagtgtagtggcaccatctcggctcactgcaacctctgcctccccagttcaagtgattctcccatcccagcctcctgagtatctgggattataggtgcacaccaccatgcccggctaattttgtatttttagtactgtattgttaaccaggctggtctcaaatgcctgacctcaggtgatccgcccacctcagcctcccaaagtgctgcgattacaggcatgagccgccatgcccagcctataaactatattcttatacatagtaagtgtgatataaatttaactgtcatcatcattatcactaccaccaccaccattacctttggtgtctttctttgccaataatgcaaattattctgggttatgagatcaatgggtactcagagtattgctctgaaagacctcagcattctttggaattttgcaattggtcaaaggtattgtatatgtaaactaaaaagtatctgagtcaggtctcaatcaatttagaagtttatttttccaaggttaaagacatgcccagaagaaaaaaacatggaatcacagaaacagtctgtagcctgtacttttctccaaagatgattttgagggcttccatatttaaaggggaaatgcagactggagggaaaagagggagagtctggtcactttactgaatccacatgttgccagggaaaagaagctggtagggcaatagacaattatgtatttatcttgtgctcagtaaatcagcactttacataagataaggtgaatatagagtagctacctgtggagatatttaactattagctatctgcttaggaacagaaggagaggcagtttcttgcatgattcaactttcagcttttttttttttccccatttgacatagtaaattgggggctggagattttactttcctttcacagatatatgactcaggatacattccaggagggattgaaagtatagtggagtagctccaaagtagaccacaactgtataacggacaaataggtcagctagttagttgggagcgttgccataggaattgttgtgctattaaatagggttaatgttttcagggggagatagtagcttaactagccatatttggatgatctacctagaagttgccacaaatatatttgaattgacttgatacaatttataataatattaaaattatacatcatagaataaataatttttttgagttcttattaaatgtccggaagcatgtaagcactttgttatcttatttaatcttcacaacaaccttatgtattggagatttttattattttcattttataaacgaggcaactaaggctctcaaatgtcaagtatgatcagggttgtcaaacagccaagggacaaattggcatttgaatccaaatcaggctgcctctaaagttcgtgctttttcttaactactatcatgtattccttcctaaacccacgtactggggcttcttagcaattattccaagtgcccgattttgtggatgacctcaagacgcagtcttcactcagatgtagacccgatcacactgaggcagattctccaaagcagaagaggcgcaagagcattctcagatggagagatgcccctgagagttaaactccagctctgatcatatttttttccacattttcttcttagttgaaattagaaagaccaccagcttataccttgcaaacaactggccttgcaaaggagccaggcccgacttttcctagtgcagcttccttattattctctaataagaaatagatttgataatagcaactagaattcatttagagtctttgttccaagaacaaattaaagtttccgctttgcctggaactcatattatttgaattgaaagctaaaatgtcctggactaagactgtctcagcagcatctttatgtaaactccttcattttaatttttttaacttttttttgtggttttccagcatccttccttttaagactttgaatatctagtaaacatggccaaaagtattcttcacactgatttggcttgaacttatggatgagaggagaaaacttactcttaagaatttaattagctttcctggcactgaatttctaagagagttatcaaccattcttttttcaagtcaaaacttgcaactcaagacggggagaaggattttcttaacatttcctgattccagaaacattctggaagatttatttttttaggttaatagagcaagataaagtattttgtttttttcaggacaagtagtcataacacatattggtcaatgagaaaattatggctggatttcttatctaacagctgcgtctgtgtgtgagggaagcaggtgcagggagaaaggaagggttagttcctattcttacaaaaagaatgacttttctactatgagaaagttcacagatggtaagtttttcagtaaaacaaataagtaagataagcagagatagtgtagagtcttcaaaaacacaacagtttaaatcaggaggggttgctgtactcagctaggtgtgtctggagcctgtgtactagttctgatttggacacattatttttctttaatcttttctttcctcctcctccttttcctttgctactggttattggtgtttaccatttgccagacattttactaagcactttacatacgttatctcactgaattttcacacggcctatgagagaagtataagcatcacctccaactgacaaacaaggaagtcaaggctcatgaaagttaagtaacttgccccaaatcaggcagagggaaaaggtagagccagtactcaaccctatgtctctctgactccagaccttgacctctcaactaccacataatactgcttcctcactgaaccttttctgttctttgtccccagggacaggatgagaacttcagtcaatgttgtgggtgactcttttggggctgggatagtctatcacctctccaagtctgagctggataccattgactcccagcatcgagtgcatgaagatattgaaatgaccaagactcaatccatttatgatgacatgaagaaccacagggaaagcaactctaatcaatgtgtctatgctgcacacaactctgtcatagtagatgaatgcaaggtacatttcccattcatggatatcgagacttgtatatagtagtgcatgcttgatttctttaaaaaaaaaaaaaccgtaaagccctgcatgtattattgtcacatttattttcctaaagaatcatgtaacccaagcttctgtgagtcccagatcatctaattctgtgtctaacatggcaggaaatcaacaagtctgatggagaaagagtcaatcagttgcttatttcgtccatgtgatgtgaaacaaccattcgggttcccctatctaccccatttaactaatttgaccagttgtcttgaatatttcgcccaagaatttgtggttactaggccgaggcgggcagatcacgaggtcaggagatcaagaccatcctggctaacaaggtgaaaccctgtctctactaaaaatacaaaaaattagccaggtgtggtggcgggcgccctcctgctagtcaggaggctgaggtgggagaatggcgtgaacccgggaggcagagcttgcattgagccgagattgcgccaccgcactccagcctgggcgacagaacaagactccatctcaaaaaaaaaaaaaaaaaagaatttgtggctactgactttcaaatattttattcctcaaattaaacatcaagagaaatccccagcatcatctgatgtacctagcacaagtagtcctccttgctatatatcatatattggtcaaaaatgtgccaacttaactttacacaactatctttttcttatttgtgtgggaaaggtgaattttgacctgagagtaccttgctccaaaagtgggtaaacaatttcaagtaaagaacagctatccttcaggacaattatccagaaatgtctttttaaaaacactacatctcagacaatgcctggctgtgccatctttctgcagcatggatgttctgggctctcctccaagctgttgggtgctaattcttcaagcttgatgggctctgtctagccttcattgtaactaatttgacattgtcaaagtcagagtgtcatgaccagagtaaagcaaacttggagaaaccctggcaggtgagcagaatcaactctgggggttggtttctaaaatgattccacacagcagctgaggacaagctgaacccagccagagatctctggtagctttttgacttctgttgacaaggtcacatttaatcactaatttcttcctatattacttctgggtcattacaaatacatactgtggctcttgctgggcaactaagggtgtcatagaaacaattctctttactggattgtaacataggtccagaattctagtggactagcacaggctttttcttgtcctctctttgtaagatacatacatgggtgaacaaggactctgaaacaaattagggagggaaaccacccatcaagaggcaattgcacaagtttattaattgactcagtgaaaatgattcaaattattagaaattcagatgtacctagaggacatgatgcattctcatggaaagctggtgtttcccacatctgagtgaatgtgctggattattccccatcaaaatgttagtttgaatcaacaagggtcaataatcttgtgaatggctttatgttctagtatatttaagtacttattgtgtgccttgtaagattcagttgagtgcgcctgtctcattcctgtgagatcctatattttgattattcatccagtatttattgaatgcctattatctataaagccataaattaggcactggaggacagcaaaaagaatgtataatgttgtaatgatgataagacttgaactcaaattattgccatatgaggaaaaattatgtaaaacaaaaaaatcacaattttttaaacatttcataattatatttgagaagaatcctagtggttaactgcgtatggcccttttggaatttctcaagaggcctcttaatattttgtaggacactttttgaaaaagaaggtgtgggcgtggagatgtctttagatttcagacttcctggatttgtttttgaaggacatcaagcacctgaggataaatttgcttctttttcttttttttaagacggagtttcactcttgttgcccaggctggagtgcaatggcgtgctctcggctcaccacaacctccgcctcccaggttcaagcaattctcctgcctcagcctctcgagtagctgggattacagtcatgtgccaccatgcccagctaatttttttgtatttttagtagagatggggtttctccatgttggtcaggcttgtcagtaactccttacctcaggtgatccacctgcctcggcctcccaaggtgctgggattacaggcgtgagccactgcacctggccaatttgcttcgttttttaaagcaaactatttcaagccctataaggaaatgtgaattatccatattagtagaaagtaagctcattaggagtaaggctttgtccccagttatactactgtgacccagccctaaaatagtgtctggcatgttgtaggggactcaataaatatttgttgaatggatccttttagcatctttagtccttgctgtgttttaggtaacctttttgctggacagttccatagagatagtggctcagtctctatgtaaatggttagccagccaaccacctgcaaactcattggttaattagcctttaggtgaccagtggtcaagctgagcaggtcttgaagatgatgaaaatagctctattggtttatcaactatttcagttgtttacatttttaatgaaattgttgggttcagcttagtgaaggctatttgatcctcagcctttgctaggtaaagcaagttgattcttctcactctaaatcagttaactgtgttgatgctggtgtgggaaggaggcagccagagccatggagataaatttacaccctttctgaggatatctgggtcacatttacttattcctttgaacttccttatggttaattctgtctcactatttcccactttttaaaaactgagatgggagatgtcagcgcttgctgccaatgccatcctctttttcttttgtattacccaagtggttggagcagagagaagtgggacaggttggggaatggagtcctggctttctttagcccagccaagaaaggaaacgccaaaaaaatctgctgtcccagattcttttgaaacataggccccagtatttacaaacaaaaaaacaaaacaaaaacacttccccccaagtgctgtctggtctttcaaaggcaccacactgtgattgataattttgtaccactattgatgcggttcatcgctgagagccaaataggcacattcaaggttatagtgaacagacaactttctctgggcagacagtctgtccctggcaatctttcttgacagttcactgaaagggaaacaaatttgctgcagctctggtcaaaactttaaccatttcaagcattgttatgtcttgttggtctgtgtattcaaactcttgcctggtaatagtagtttgaagttacacaatagttttcaagtttaatcagaataactgcatgtggagcagtcattgctaattgcatggtctgtttttctgaaaaaaattggggggctaatggggattggataaatggtttttattttcctttgcttgattcgttgaagggcacttggttttctgttcctagcatgttgtatgtggtcatgatgcatgcatttcacttccacttgggtaagaagaaagtcagatttctttcaaacattactgcgtttgtcacgtctccatattctaatgctttcataaatccagtctctccattatgtggaatatcagtcgtgggtttaagtttgcacatgacgttgaggacagacagacagaaggtaagctaggaaaactacttagaagtggaggggaaaacctcctattctgcaaaaaggttcagttcactttgagccagggaagcataatatagatggtctggtaattttatctgattattaaatgtctgcattgaagtaatttagataaacattgtcaccaatctcagacttttaattctccctacttttctttttaatctttaaagctgggatagcttatttggcacagctgaaatgtcatgatttctgatttaaaaattagacacgtatgccatctacctggtgtcattgcaactgaacctttcacatgcatgagtagaactagatacctagttctggatttcttcctctgtggttgtatggagtagcacatgggcactgtattttaaggactgtgttattgtgtgatggatctctgggtagttagacaccccacaacactaaaaacatagtagaagttattccccaaattacaaagcagctttaataccttgatactcccaaggcaaatatggatttttaaaattctcagatcactgttgaaacccaagacaggttcaaattcaatttggaaagaactccatttaaaactaatatttcagtcatgtagtataatcttggatttggtgcttctccacataacccacagggcttttttctggttcgtggtctgtaagctggatgttgatgataattattttcaggtaactctggcagccaatggaaagtcagccgactgcagtgttgaggaagaaccttggaaacgtgagaaataaggatatgagtctcagcaaattcttgaataaactccccagcgtatcctatggtaactgatgatataaacaagctttctttaaaaaggaaaaaaatgcgtatatttctatgtttacttaatctgttagccgaggcttagaggagctcttgtgagtcagtgatgacaggcacggtgctgtgtctttgccaaataatgctttataaccgtctaattttctcacttgtattattatttgaatggatgctgctggaggaatcagttggaattgaagacacgttcttgccagcttcccttttctcccaagatgcagaaatgtggatgctcttttcccaggggacatgagtaaagcagtgtggtacactccagggacttgggaaaatgagcaaacacacagcgtgttattccttaaagtgttctccatgtctcgccttgttatgcacaagagattctattaaaagcctctagaagtaactccccttaaaatgtctagtaaagcttgcacatggattgattaaaagcaaatacctgtcttagggaattctgacaatttatcttccatatgctctttaagtaaaatgtttcaaagacagttttaaagggagccatgctcttaaaggcagttgattaaagaacctgttacatctctgccttaccctgtgtaatctgtgagaacaatggttgaaatttcaaagtatgtttcattattctttctaaatttgataattgattaggaagtattttatatataaccactgtagatattgacaaaagtaagagagcacagtcaacataaagtttaaccagagttaaatattcaaatttatttatgttcggtttgccttcacctggtgtagtaaaatcaaatgagattatttggtatgtgttttgctttgtttaacccaaaagattattttttggttcctaaagaaaaagatatttttaatctgtcaattatttcagtcatcatctcatcgtcctagaaagcctggtcattttactgtcctcacacatggaagacacttgtgttggctgtgcctcttttaatgtcatctcttgatgaaacaaaaatactggtatttatccaatatgttgaaagcgttttgttatcttctatcaaagcacataaaaccagttataggacacagttggaagcagagccagtcttcctcctcagtcttctcagtagaaaggaacagaaaacaaacatctgtgcaaaaccctataaaagtgatattcctatggcagagtccaggcagccttgaacaatgacatggcaacaaaggatggctctgtacaacttcacagatggaatcttgtttaaggctgtgaagttttaaggaataaataatataattggtgtagcacagtgccttgcatgcagtaggcagccaacaaatccttaatgattggtaatgcaagctaaaatttttaatgtctctactatccttttttattgaataacgcacagtattttcctaaggttgctgggtttgggagtaagcttgggacttgaatcattgagaaataaagcacatttgactctaagaagtatgtagaaccttgtttataggtgagaataggctgtattacatgaaaccagcggagggatgctgagacagtcatggtttatagaatccaaattctctgagatgagggtgcttatggacctcaaatagcctttcttatctgctccttgtgacttctctcttttaaatcagatacctttgaaacatacaagagacatgagattccagttgtttttgtctcctaaaccctagtgatttttggataaggatcactactgaacagtattaggcaacttttcatttttgcttttcaaatgacattggtctttatttccagtagatgggcagtaaacagggtcagggtggtcaagggatatgattaagtgtagtagtagaaaatgcattctttttttttttttttttttagacagagtcttgctctgttgctcaggctggagtacagtggcacgatctcagctcactgcactgcaatgtccacctctctagttcaagcgattctcctgtctcagcctcccgagtagctgggactacaggcacatgccaccatgcctggctaattttttgtatttttagtacagatgggtttcattatgttagccaggatggtctcgatctcctgacctcatgatccacccgccatggcctcccaaagtgctgggattacaggcgtgagccaccgtgcccggccagaaaatacattctttacagcaaatgttataggttaaggagacagttcctgggtttagctgtgaaactgtttaggattttctttaagtggtgttcccaagagcttttttctggtaagttggaggctataggcaaagcgtctaggagcttgttgttttttgctatggaaggccagctttgggatctatatacatgggcatgtttctcaatggagtggtcacaggattctcttctcagaactctgcctgaaacctttccggtgtgttttgtcttcaactttttcctagctatcctattagcctgtaaatatgtcagcagacaatgtgtttggaagaaacaaggtgtacaacttcacaaagcaagttttttctggtctgagacttactgtgtgcaggaagtctcgtgagaatatacttagaaaatcacacttatctggaaattcaataagtcatattaaaaatatacaatttcttgaactcaggactagcctgaaaatccaaaatgcatgtagagttgacatgttgacatatgtctatgtcctctgtttttatgtaagcctcatttatttctcccttgccatgcccatttgggattttctttgcccagcatatgtgccataaacagaacaaatggatccagggtatacctctaataacctttatctaaatagaatacatttaacctgtcaattatatgtatagatttatcctaattggttcaacatatatatgaatgcttgtaatagtctgttactatttgataatgcataaatgttatatttatatacagttacagcaggccagaaacatacatacactgcatcctgtaaggtctgtaaatcagggcttcggcaatgccattttgctatagactcattcatgttttttaggaatcagaatcatttcaggagaaaaccaactaagtagactttaattcttctctttctcattcttgccctttgagaaacccaagtggaatcatcacttaattacttactcaaattcaatgaatcaaatccaatccaatcagtgagaagaatagcttatctttcaaggtaatactttaccttagatctttgagggcatgcttcccatacaaagagcatcagaaaatcagggcaatcatctagatctcacagatcttcaacataggactctaggttatgagagctgaaccacatagctatcagtttcagtttttacttcctattgagtgtgtagaaacacagcctatggttttgctgtctgcagaagttaccataccctgtaaaagacaaatatttctttctcctctcgaaccactagtcagcctggatattcatgaaagctgaaagaaggggtgccaaaatgcctagctcctggatttagactcatggaatatgagaaaggcttagggaaaattcaagtcatggggagattcctgctaggtgatgccaggaatctcaatgacctgttgattagagggtctctggtcatttccacttgtgtgtggagaaatacatcatttgcatatgtatctagtcaagaagcccttttggagcaaagtggttgggaaactcatttactgggtccaccaaaggaaacccaattctgccatgtttttgcaaatactacacgtccctttgctctcaatagcaaaagtgatgttatagttttttttacttttgtcagaatcaaggcttcggccacctgtgcaatattttcccatggaatgcagcagtaaatccaagtaggtatatccgtgctcagagagaattctccatagttctgactcctgaaaaacaagtctcattagctctcatctagtttgatgactaaaagtgcacagcagttataccccagtggaagtgatttttctcacctagctgctctctaactcttacggctatctagttgtctgagctgctggtttgttttacttattctccaactgaactcattccaaaccaagaaaaaggaccaaatgaaattttcagttattatcatacttgctccttgaataagaatgctagagtctggaggcagaagaagactaagttaaaaaaaaaacagcctgaaggaattctggagtgagttttgtaagtctaattgtcaaagaagataaatggtctcagtatctgtagtaatttctggttaagcctagagggatcactgagtgccaatccaagcaggtggcactagaggcagattgttctcctagcatagagtgagtttccagctgctcatgacacattttcttatgattttccctaaaagaaaaccaaattttctactccacctcttcctttcctatcattccacttattgttgctgctttgctaacagccagcttagtaagccatcacacaagttagtgtgaggcttggttttaaaatagataacagagaatcttgattaaatagtatccaactttgtagcataacacagctaattcaggcaatgacatagagatgataagaaacaacatggtttggtagagggaacatttgatttagactctgcccatttttagctgtatgacttacataagtcattttgtgtccaagcctcattttctcccatatgaaaagtgaaggggttggattaaatgactaaaatccccttccagccctatgagcccaatgtattatgatctctgctttgtttccttcttaagaggcttcctactataaaatgtgacctatttacattttaagttgaagtagcccacaataatgaataatcaatttagatttttctcatctcctttgggagaaattaaattcaagcctctattcatttgatgttttacaacaagcttcaaagttggccatgttcattcacagtttgatattttgagacaccaataaaagttttttaataaaagttcccttgacttaaactcaccttcctaatagaagtagtgatttggctcacggaaaaatgtttccagagtcaacatgagaggactggatgaacctacagcctcactcaagctgttgcatcattgctgctgtagcaacagagccctctctgaatacccaaaacacacaattttctccaacaattctaattgcccacccagtatgggaatttgagagcctttggtgaataaccttgatcactcttttgaaatttggtacaacacttgcacaatcacggcaactgtttgtaaatatcttttcttctccgccagtatgtagacatgcacacccattcacaagtaagcccgcaaattcattttcacattttcctcttggtttgtttttatcatgggtatcacattgcaggaagagatgctctaacttacaagaatggaattttctgactatcattgccctcttcaaggcctgattagtttgtagggtggatgggatacaatgcatggtctacaaggtccatgtcaccagccatgatctttaaacaacctcttgcactttctggcactgctgcaatggcccatggtggacacctctgctgtttgtccaaacttctgctaaatagagtagtgttggtatttgttgtgttgtgaactcctttgttgtcagagaagacttcagctcttcaggtttgcaagggcaagatgtaaagctaggactgaaaggattgggttttgtttttcggccggcttttttccattagtgcaaaaaacctgatgcaagggcagcaagataaacacaatttcttcattgacccagataagaacctgtagaaaagtgagagatgcccctaagttcctatttcatttatcctaaataatatcctgaataactactgatcagtttttttctatgtccagccttgcttcactttccaacctccaggccaaatattcattttgatattttacaaaatccttctggtttttacacagggcccttttgtgctgagaataaaaccagctattggaacagacctcactgctttgtagagtcagaagttgacctagagaatgggtagcaacaggtcctcagtttctctggagacacccccaatccttgggtgagtgttgaaacctgacaactgactgttagccttgtcatcatcctcactggagatggagatgttgcagtcggagcctcactccttctggggcactgtttcttctcatggcaaccattttgcctgcctggaaacagcctgttgcctttgctagggggcaaatacacacactagccaaggaagttggtccagcacatctctgaggtttctcccccatggacccatggagcgaattccctgagataaatgatcagaaagttggctgtctggtggtttaatactccataagagttacttcccttatagaaagtcatcctttggcatctagatttttctacaaatcaccttaactccctccctttctctttctcctggaaaacctcagcattgcatctccatgttgcacaacacagatcagattatctggtcactatagagatttgtatataaaaaaactacttttttgaggattttgtatattgtttttctatttgttttctacagcttgaggaaagagctggcaaactgtgaatctaacttgatcttgttgccagcagatatattttggcttcctggtaagagtctgtgttaccagggacaatatattgccctctgatcagtattgcaccctaaatccacaaattcctccagcccagtcttacatttttttaaacaaatcccctagcttgtttgctattatttataaagagcattagaaaatgtatttatagacctggatgttatatgtttaatattaatttagcctttaataatgttataggtttgtaactattcttcagaaattataaagaactcagtgtagactgaattaatctatttagtatctgtaattttgcagacatattttcttacagtattttctatgtaaccacacatgtagaattataactaattagagcacaagaagtttcttcagcaatttagagctaccaattgtttcttgactatatagtcacatttgacaaatttaagaacccagtctttagtgatgcaataaacaaaatgaaccattaagaacaaggaattgcttaaatcccttagctggtgaggatatacatctaaataattcatctttctaactcaaggaatggtgctgattttttaaatgtttgacaccaggccttgtttttccagctgagcattctcattttgcttttctctaagactatcaaagacaaggtattaatagtaggattattcctagatcagaatgtttcatacattcctaaaggtttatgtggaaattggcttaggaaaactttgagtagcagagactgaggatgagtgctagagatgaaatcaggacagatttgttgcagttaattcttgccaagcaaattagtggtaaatgtcacattgttatgtgaattgagcacatatttttaaagaaagtttacaaaaaatttttagaaccaactatgaggcaatactgtatcactgggggctgggagtgggggcttagaatcatactgaaattgtttaaaagcagcccaggtagtttctgtcctcaggtgaataacagactatataacttccccgaaaggtaaaacgatagccactgcagagacgaggtgtcttccttccaccaaatactttctgagatggtggtaggagtagtatttttaccgtggtttaaaaagtagtcagttacatagaaagtgtattggtatgtatttgaacctgctcttcattaaacaaacagattagatgtaccctcgactggcaataattgtatctattttcaagtacagctagctgtcaaagcatgaagctcttgtgtatacacactgacacttggttcacgcatgaagaacagtgcctatgcactttgtgtagctataatgtaggtatctaggtgtaatttcagtgaaatggtgtatagatgtattgtaatttaaatgtatatgttatttttggctattcatctaaatgcagtagacatgttgatcggtgttttgcaaacatttctttttccttcttagataactagtcgtgaatcatttctcctctttctcagtgtggcttgggaatatatatgagtgaagaatttatctgtgaatcctttgtactgatgattgtttgaaagtctgtgtgtgtccagcacctttgtaaatacacaattcagagcagggatgggctgggtgtgtgtcctggttcttagtgaaaggtcatctcatgtctgtttaatacatggtgaatgcaactgtggaacttttgattacctagacttaggtaggtttagaatgagaacatccatctacagtcctcctttgcttggtggattgggctcagaggaacaaaaagttagtctgactctgtgcatattagcatcatgtctttagagaaaggtcagcctctctggttgccaaatactcatcatgatgctcatgacttaaaggttctgaggagccttgtctcccttggatttttgagtcagggtacaggaaaaaacattgctgactaactaactgcaaatgcatctgcaggtgaaaccctacgaaagcacagttctggctataaacttcagagttctctgtaaaaaacttagagcactagaagcacaggaatagtgagtgtacagcttatgcggttgtagaggggcaactgatgaacacaggtcccacatatatgagggagtatgacgttctctacctaatatgttctgtgtgcatgttttgaatgattgaagatgggattaactaatgcaagtttacagttgcctcctaaaacacacattctgtataattatcgctaaatacaatgctgtgaggtctatagttcctgtaacccctttctcctccccaaggacagagaagaactagccatgtgctatagggaaccctgagtgccctactcttttcccaagaagggtaaagcctacaatatcatcagggggcatgaagcacattaatttgcagtggctgcttcatatgaggagatatggtggacaggctaatttttccttgaaaatgtggcttcttcaactcctttcaaatttaggatggaatacttcctgaaataaaactgggctttatgcaggattctctttgaaaattcttgtatgtccagaacaaaagataaaactaattgtattcctcacattcacaatccccattggtctgaagtcacgtagcacagagcatctatagcacatagtgtttaaagactaatgaatgcaaaaagataaaatcttcaactaatttttgaattgtttctcatatatgctactagaaaatgccttgttgatgaagcacattttgggtagttgaggtcttttgttttcgcctttagctttctaagctttcttacaatgtggactgattactgtaacatttcacgtgtaaaataactggatattctttatatactggaaataacctgtgaatccaatatttcactaagtgttttaacttttgtgtatatatctctcatcaataaatgtggatttcaatttattttggttgttgcctcttctttaattcccattttagactaattgttggttacatagtagtgttctttttgtagaaacatgaattgatggctacaatgttaaaatgagtattttctaggaagcctaaatatctattggaattacatcgtgcaatctaaagttagtaagttgaatgaaatggtatatagtcaatgaatcagctggtatggggtagccctcaaatctcagggccttaaaaccaaagtgtatttcttattcatgtgacatgtccattaccagttggctgggagactctgctctgtgctgtcctcactcaggatgtatgagggaggctccatctccatgcttttgcagctgccagtgcaggaagaggaacttggcaaatcttacatggactcttacagcttcccctgaatgtgtgtacctcacttctgctcatatttcaagggccaaatcaattcacatagctccatctaactatgaaaggaagtgcaacctcaccagattcacaggaagaaaactggaactagctggtgaatagctctaatgactatcaggccatggaaatcccttaaatcattcataaaggatagtatacaaacatatcatttctcgacaagttcaacatagcaagtttttcctccagtattggaaaaataatgactgtggaagtaaggggcaagccttaactggtgatgctgtagaaataaaatgcatgctcttcgacagtaggatcacacccagcatggtgagattctgatgcactgaaaggtatatgtccaggaacagagacccacagaaagagtggcagactcttgcgtcacactgtaggacacccactgttagatggcctggattagttgaattgttttctcttattctattttagggggaaatgaggcaaatatttgattttaagtaagtaaaatacatagatgtgatacaccacgatttttttcaccactgtcggtaatttattaaaatattgaaaatggacacttcatttgaaaagacatgttttgttcttcccttggagccaggtctacatcccatccacattcaaaatgttattaaaatcttaattacagaaaatatgctcattagtaaatctctgagctgccattttattttaagatagcagatagccacaaatcagagttaaggtaaacttcttaatgctttagtatgtatactcttaggtccaaatcagccactcctgccaaaggcaacacacccagagagagacttgactttgcttgctcagggaatgtgatttccctgctcttctggatcagaggtgtttaatccatcctttgtgagggcccactaagtgctgcttttaattaccactgcatgaaaaggaaaaataaaaaagaatttacaggggtaagtagggaaagagtaattgtggactgagagttttgacccaggaattctggtctccactcagtcactgaagggtcatacgaatgtggccaaatgtctatgcaatttggaagtcatcttggcatacataaaatgaggggtttcaagtagatcacttctacgcttttggactgtgaaatttgaattatcttacccaggtaagtcatcatgactacagatttacttttattttctaatcttactatcttaatataacatctcatacctacaaaagaatctctgtaacccatgtcttggtcttatgccacatgagatactagcccacaagcccactacccaatgcaagagctatagagcgtcgccaacagccttccttcacccggtgctcctcgcttgttctcgtgctcctcccttaccttgttctcatgctttactccccagaggaagctgctacttgcaattttgtgtctattgttcccctgttgatttttttttaaatagttctaccccccacaacatacgtgtacccaaaccagctttgcttatttttgagcttttttaaaaagagtgcatgtagtctttttgaactgttatttttctatttaacattgtgtttctcagtccatccatgttgtttcaagtaactgtggtttgttcattacacggttgtgtaataatatgatagcatgtgaaatatgtcatgctttgtttattcatttttttggacagtggacttgtgctcttttccaggtgtttttctatgtcgagcagggctgctatggacattgtcatctatgtctcctgtgtgtatgacccaggaggctttagtgcatgtggtcctaatttttaagaagtatgtgtatgtgactgaaaagttcctgttcaaatcttttacccatttgtccatagccccatcagtgagtccacttgttaaccatttggcacccctaataatccatgcactgctagtattccccaagtgattcacacactgctaataatcccctagtgatccatgcactgctagtaatcccctggtgatccatgcaccgctagtaatcccctggtgatccatgcactgctagtaatcccctggtgatccatgcaccactagtaatccccaggtgatccatgcactgctagtaatcctctagtgatccatgcactgctggacccctagtgatccatgcaccactagtaatccccaggtgatccatgcactgctagtaatcctctagtgatccatgcactgctggacccctagtgatccatgcaccactagtaatcccctagtgatccatgcactagtagtaattccctagtgatccatgcattgctagtaatctcctagtgatccatacatcgctggctgtgttatgggtccatcttgccaacatggatactgagacaagcaaaatgagaccatttttaggaagggagtgtaagatgaagggccgaggccttctttcctcaggctcaaatgatgaggcctttgagcacagatctaatgggagcaaaacagggcccacttcatctttgatctcttctttgaccgataatgtgtgaggcccagcaggctctacctgacatcagcgggctgtttgctttgatgtgaattgccaattaacagaggaagttacagaaagtcacaaaaaagtctttccacctaccacaagaactgccaggagccccttgagccacatccccaacgaagttctggctgtgagaaccctataggctgagtgctttatcaactacagaaatcaatgccttgcagttgaggaaggcttgcagtgtgagatcagtgtggcagcatggtgttttctggggagggcccccttctgggtttctccttatatcctcacatggcagaaagagggcaggggaactatctgaggtcatttttataagggctctcatcccattcgtgaggaatctatcctcatgatctaatcacttcccaaaggccccacctcttaatactatcaccttgagggtttggatttcaacttataaattttggggtaaaaacaaacattcagtccattgcagtgccctgccctgtgatggaggattgtagaaccacaaagggcaatacctgcaaagagcgtgaactgtgtggcctgccacctaaggcactggccctagtgtgggcacctccttccaggcacaatgtcataaacaggatgccagtgttctgtacgtcaaagaaccacaggtgacagcgggttcaggcacctccaggagagctttcatgagaagctttcctcacttgtcacctttcagcccagacaggaaggtgtgagtagagatgcccacacatctgacttgggttgagcaaggagagaagactgtggagtccctggcaacaacacaaatgtttttagctcaataattctttgtcctggtagtttttaaagttcaattaattcattcttccactgaggcagtgaaaggccatatttaattcccatattgtcctaagaaaaactgagccacagagtcaggctcaaattccagagtgtagactgggtccacacagcttgtccaaaaaaatataaaaagaataaagccatccaatgcaaatactgtttttactctcaaacgtttaaaagcagagacgttaaactctgaagaattccataaagcagataaataaaatattatttcatggttctccctttcctttttacaagctgaatgaatatgtaaaacctccacatctttttatgtctgttatttggggtaatcagattttagccttccaaatattgtctggaaaaatctagtggcttccagttaaggaaaaaaagacaaatttagaattgcagtcatctgttcctcactccttttgttgagtgacctgactcccctggaattctccaacagcttctgtcacttctcagatgttttccaggcctgaataacacactgctcacaaacggaggagccacagaatttcccaactgccttcctttgagtgaacagttccgttggaacaccatcttccttctccacctgatcccaaacttccctttcatcttggtgatgaggacagagatcattccagattgtaaagccagattgttagcccgtgcttttttgcagataaggaagaagataccctagtttaaatgaactagaggtaactcagttacaaaccaagcttaagtcctggctccatccctttcctagctatggatgattggattgttaacttagcctcaattgcttcatcagtagaatggggctaatcatgcctatgagatagagattttcatatgagaacattcataaagtagttagtccagtgcttggcacataatgagggctcagtcagtgatagttaccaccatcatcctcatcatcatcctcattatcactattttcatccttagcgttaccaatcaccacttctttgtgaccaagctggaagaagtcatgcctcctctctcccagtttggcctttaccccaaccatatcacatggacaccagcatgtaatccatagctcagctgccctcccccaaatctgagctttgttagtagaccatgagctttcctgacctagcctgggataaccccacctttagtctagaggagcttcatggtcattacgagtttgcattatctgatgttccaaatgtcttcagttacttgccaagtctctgaggcttagcagtgagagaaggcactgcatttcttcagggaaacgaagtgagtttcagcctggcccaagtgacctctcactgagatgggagcctgagctggcccttccaatgggaaacaggacatccagaaatgaagcaattcttttcctcactggaggagtccctcagggagtccccagctcacagccttggatgggctagttgagacaaatgtcatgagaaaggccatttctgtggaatgtacccacccagcatgactctccagaatgcccttagctgatcaattcccagcagctctccttcccatcatccctttattctttgccttgtgttctttcacaaatgttcttgctcttccaagagcagatctcaggaggaacttctgtgagcttttaggttgacggagcttccctgtggctatgctagaatcacctcaaaatggtgccctctatagttttcagcagctcagggcatcaccacaaccttaagagtctgctatttactattaatagtaaatcattaattaataataatattagtaataatacaattattaattgtcttaagtggggatcccagtgacaaaattcaaattcacaagattttcttgagggagtatttctcaggagggcctgtaagggcacgaggggagcaggacagggaagggaaagagctgagcaggaagatagtctcaggaaaagtctaactttgagttgtctccttgaggaaacgaggtttatctttgcgcactcatatcagtcagtcattggctatgggctacttacgggaaggaggcataacctccagggtgaggcagctcccatctgcagaaagccgtttgctggagccagctgcaagtttttagctgtcaacacagcagttaggctatgagtgcaccaatccaggaagggggtctgggcagagcaccaacagcatctcctaaatatcccattccccacatgcctgctatgtggcagactcttatgtaggttctttagtcttcaaaacaactctgtgaagtagttgctatcactctccccattttgaagataaggaaattgagattcagagaaggaaatatgcacacctaagaagaagctgacctgaaagtctttctagtttcaatgcttcctactatattccctctgttttctcaaataacccagagactatactgtcacattatctgtttcttatggtggttgaacctctgtgctgggggcaacttcccttgatatctaattttgaagtcctaattatgcttggggctttagggcattcaaagaagattgatcatgcttattatcccatagggtcctgcattatctacttgcctacctcctggaatcatgaaacccatgtacggtaaagaggagatctcaaaaaataactggagccgatagatgtacccatactggttggccccagtcagttagaacatattctcttccctaaagaatttgctaagtcaataggccaaggagtgtcatattgagactgagctttgatcaactaggagtgaggaagattcttagacactatctgggcagattaggaaagaatccagattgattataaatgattgcaaaggaagaaggaagggggagtgactaatatttgtcttatatctgccatccttgcaggtatcagtcaggatgggctgagttgtcctgcagtaacaaacaatatcaaaatctcaatggtctcaacaagataagtttattattgactttcatcacagtctcactgtaggtcaatagaaggtcctgctctctgtagttactcagggaccctagatgacaatcaactactgtttttaaacaggcttttgttgacgtgccaatggagaaaaagagctctaggaaagtccttacctgagcagttaaatgtcacctcagcttacaacccactagcctggtcaaatctagccacataatcccacccagcttcaagggataatgaaatgcaattccaccacattctcaaaatggggattgggaatgttggggggctggagagtagagagagagatccagaaacatttggtgaacagcacaaatatgataccacagtctacttctctggtcacctagtattcggtaactctgtttcccacacgcaaaattcttcaaagagaccacataaaggtttcatccagtcatgacatcaaggtcaaagtccaagaacttggcaagatgcatggaagttttcacacatggttcagatgtggcttccattgactcaaaaatttatgaacagaaaatacatgttttctgtagctccattccctccttttccctggcacacaaactccaatggtggaataggaacagttcagttaccataaatactcctgtctggaaaggtgacccctggaagacttacgagtcactgagccatagcatttcagaaatcctgatgggcagacattacagagcccttacactataataaggaattcttttgtttgtttgtttgtttgagaccaagtctcactgtcaaccaggctggagtgcaatctcggatcactacaacttccacctcctgggttcaagtgagtctcatgcctcagccttgagagtagttgagactacaggtgtgcaccaccacacccagctaattttttgtatttttagtagagacagggttttgtctgtctggtttgtctcaaattcctggcctcaagtgatcccttcacctgctttggcctcccaaagtgctgggattacaagagtgagccactgaacctagccaataaggaaaatgcttttattagattctggtctggccccctggggcagcttccccagtccatctccctgtcttcccccatggcccttaatattaccttctaggaagtccttctttttacattatactttgttgacgcatctaaagagaacactaggaaataatctcctcttcagcaacatcctctgctttatgctctcagaaagttaaggttcattttcggtcttgaacagttacagagttttctaattaaactccatagtttttttggcatcacaactcttaacatctctgctggcctttatctttttgactctaattagccatatatgccaaccaccataaccacagcccttttaaaaacatgttcctttttcttaattgtgggtaccttgagtcaatcaggcttaaggcagagaggcgcattcttagatttatttttcccttagccatttttttaaatgaaagaatatcctggatgccacattagttaatgcagaggctttaacaatggatgtaatgaccaagcacttgagttgattttgcctctgaggttgagttgggttttattgcataaagcatctctctcatttcatcttgtattgttgcgaattaagaagcaattgtctcttctagctccacaactgtttatatttcttaagttgctctttccttctggcaggtaatagagacatttttagatcacagttgtgccattagtcagggtctctgagtgactatgatgaaagaaattgtctgtggcctgtgaggagcatatagcaagaatgagcaataaacttttattattttaggccactgagagtttgcagttgtttgtactgcaaacaactgcctggtaacattaagcaaatctatctcttgctctggtatttcagcttagatgtgtcttctctggtgtaacctcagttgggaacaaaataaaacactccttatatgctagtaacaaattgtgcctatgaaaatgatgtttaactgtcctgaagagagaagactttgatcattaaagaagactttccaaacacaggatgaaggagatgacagaataggtaaagtcaatctctgaagatataatgttatgatagtttccctaagagtgaggctagagagtttcagaatgacaaaacattatttcttttttgcacctatttcaaattaaaagtgaggtttttaaatagctatgttattggaaattaaacaatggactggtagattagaaatgaccaaaaactaatgttacatgtttatttccacccccatgggatggatctccagttatcccctgaagagatgaatctctagctatcccctgaagagatggaaatctccattgtccagctgggttcttgcaatggggaaatgcctagtggaggatgctcttgttcaacagttattgaacatgtattaggtgccaggcattggtctatgtgtatttttatatatatttacataactttatatatatttctacaagtgaagaaactgaggtctaaatatatcaagtacaatgccctcaggcatgatgtccagtaagtaagcaaggatcagggcagaaaggctggcctgcctctatttttcttagatatgtagaggttaggaggcagattagttttgccaggatgcagccaccacagctgccattcagcagctatgccactcagcagctatgccactggaccacagccattgtgtcactacctctgtgaatctctcttcatctctcacttgtctgtgtgtgatttgctcaagattcaaagtcctggacaggagaatcctttgtgatcctcacccccgtctctgaccacttggtgcctccaaggcataagcatctccaagtttctgctggagcaactggctctctactcagaggctctcactctgctcacacttaggtgacatcttcctacacctgctagatcatgaattcctctgccatttactgttttccaaaatctcttgatatctttttctgctaaggtcccttcttccaatctctttgtgagtctacattattttgatgcatttgtgatcatttgagtaagtgttaggaaggagaatacataatgagtatattcaatctgttgactttaactggaattctgtgatggaatattcattctcaaatggaagcaacacttcacgctgcttcccagcaagcagctccaggtcaatgt

SEQ ID NO: 1358 - DNA, 7420 bp, Homo sapiens
tgccaacaatatgcccaagcaggtggaagtgcgaatgcacgacagtcatcttggctcagaggaacccaagcaccggcacctgggcctgcgcctgtgtgacaagctggggaagaatctgctgctcaccctgacggtgtttggtgtcatcctgggagcagtgtgtggagggcttcttcgcttggcatctcccatccaccctgatgtggttatgttaatagccttcccaggggatatactcatgaggatgctaaaaatgctcattctccctctaatcatctccagcttaatcacagggttgtcaggcctggatgctaaggctagtggccgcttgggcacgagagccatggtgtattacatgtccacgaccatcattgctgcagtactgggggtcattctggtcttggctatccatccaggcaatcccaagctcaagaagcagctggggcctgggaagaagaatgatgaagtgtccagcctggatgccttcctggaccttattcgaaatctcttccctgaaaaccttgtccaagcctgctttcaacagattcaaacagtgacgaagaaagtcctggttgcaccaccgccggacgaggaggccaacgcaaccagcgctgttgtctctctgttgaacgagactgtgactgaggtgccggaggagactaagatggttatcaagaagggcctggagttcaaggatgggatgaacgtcttaggtctgatagggtttttcattgcttttggcatcgctatggggaagatgggagatcaggccaagctgatggtggatttcttcaacattttgaatgagattgtaatgaagttagtgatcatgatcatgtggtactctcccctgggtatcgcctgcctgatctgtggaaagatcattgcaatcaaggacttagaagtggttgctaggcaactggggatgtacatggtaacagtgatcataggcctcatcatccacgggggcatctttctccccttgatttactttgtagtgaccaggaaaaaccccttctccttttttgctggcattttccaagcttggatcactgccctgggcaccgcttccagtgctggaactttgcctgtcacctttcgttgcctggaagaaaatctggggattgataagcgtgtgactagattcgtccttcctgttggagcaaccattaacatggatggtacagccctttatgaagcggtagccgccatctttatagcccaaatgaatggtgttgtcctggatggaggacagattgtgactgtaagcctcacagccaccctggcaagcgtcggcgcggccagtatccccagtgccgggctggtcaccatgctcctcattctgacagccgtgggcctgccaacagaggacatcagcctgctggtggctgtggactggctgctggacaggatgagaacttcagtcaatgttgtgggtgactcttttggggctgggatagtctatcacctctccaagtctgagctggataccattgactcccagcatcgagtgcatgaagatattgaaatgaccaagactcaatccatttatgatgacatgaagaaccacagggaaagcaactctaatcaatgtgtctatgctgcacacaactctgtcatagtagatgaatgcaaggtaactctggcagccaatggaaagtcagccgactgcagtgttgaggaagaaccttggaaacgtgagaaataaggatatgagtctcagcaaattcttgaataaactccccagcgtatcctatggtaactgatgatataaacaagctttctttaaaaaggaaaaaaatgcgtatatttctatgtttacttaatctgttagccgaggcttagaggagctcttgtgagtcagtgatgacaggcacggtgctgtgtctttgccaaataatgctttataaccgtctaattttctcacttgtattattatttgaatggatgctgctggaggaatcagttggaattgaagacacgttcttgccagcttcccttttctcccaagatgcagaaatgtggatgctcttttcccaggggacatgagtaaagcagtgtggtacactccagggacttgggaaaatgagcaaacacacagcgtgttattccttaaagtgttctccatgtctcgccttgttatgcacaagagattctattaaaagcctctagaagtaactccccttaaaatgtctagtaaagcttgcacatggattgattaaaagcaaatacctgtcttagggaattctgacaatttatcttccatatgctctttaagtaaaatgtttcaaagacagttttaaagggagccatgctcttaaaggcagttgattaaagaacctgttacatctctgccttaccctgtgtaatctgtgagaacaatggttgaaatttcaaagtatgtttcattattctttctaaatttgataattgattaggaagtattttatatataaccactgtagatattgacaaaagtaagagagcacagtcaacataaagtttaaccagagttaaatattcaaatttatttatgttcggtttgccttcacctggtgtagtaaaatcaaatgagattatttggtatgtgttttgctttgtttaacccaaaagattattttttggttcctaaagaaaaagatatttttaatctgtcaattatttcagtcatcatctcatcgtcctagaaagcctggtcattttactgtcctcacacatggaagacacttgtgttggctgtgcctcttttaatgtcatctcttgatgaaacaaaaatactggtatttatccaatatgttgaaagcgttttgttatcttctatcaaagcacataaaaccagttataggacacagttggaagcagagccagtcttcctcctcagtcttctcagtagaaaggaacagaaaacaaacatctgtgcaaaaccctataaaagtgatattcctatggcagagtccaggcagccttgaacaatgacatggcaacaaaggatggctctgtacaacttcacagatggaatcttgtttaaggctgtgaagttttaaggaataaataatataattggtgtagcacagtgccttgcatgcagtaggcagccaacaaatccttaatgattggtaatgcaagctaaaatttttaatgtctctactatccttttttattgaataacgcacagtattttcctaaggttgctgggtttgggagtaagcttgggacttgaatcattgagaaataaagcacatttgactctaagaagtatgtagaaccttgtttataggtgagaataggctgtattacatgaaaccagcggagggatgctgagacagtcatggtttatagaatccaaattctctgagatgagggtgcttatggacctcaaatagcctttcttatctgctccttgtgacttctctcttttaaatcagatacctttgaaacatacaagagacatgagattccagttgtttttgtctcctaaaccctagtgatttttggataaggatcactactgaacagtattaggcaacttttcatttttgcttttcaaatgacattggtctttatttccagtagatgggcagtaaacagggtcagggtggtcaagggatatgattaagtgtagtagtagaaaatgcattctttttttttttttttttttagacagagtcttgctctgttgctcaggctggagtacagtggcacgatctcagctcactgcactgcaatgtccacctctctagttcaagcgattctcctgtctcagcctcccgagtagctgggactacaggcacatgccaccatgcctggctaattttttgtatttttagtacagatgggtttcattatgttagccaggatggtctcgatctcctgacctcatgatccacccgccatggcctcccaaagtgctgggattacaggcgtgagccaccgtgcccggccagaaaatacattctttacagcaaatgttataggttaaggagacagttcctgggtttagctgtgaaactgtttaggattttctttaagtggtgttcccaagagcttttttctggtaagttggaggctataggcaaagcgtctaggagcttgttgttttttgctatggaaggccagctttgggatctatatacatgggcatgtttctcaatggagtggtcacaggattctcttctcagaactctgcctgaaacctttccggtgtgttttgtcttcaactttttcctagctatcctattagcctgtaaatatgtcagcagacaatgtgtttggaagaaacaaggtgtacaacttcacaaagcaagttttttctggtctgagacttactgtgtgcaggaagtctcgtgagaatatacttagaaaatcacacttatctggaaattcaataagtcatattaaaaatatacaatttcttgaactcaggactagcctgaaaatccaaaatgcatgtagagttgacatgttgacatatgtctatgtcctctgtttttatgtaagcctcatttatttctcccttgccatgcccatttgggattttctttgcccagcatatgtgccataaacagaacaaatggatccagggtatacctctaataacctttatctaaatagaatacatttaacctgtcaattatatgtatagatttatcctaattggttcaacatatatatgaatgcttgtaatagtctgttactatttgataatgcataaatgttatatttatatacagttacagcaggccagaaacatacatacactgcatcctgtaaggtctgtaaatcagggcttcggcaatgccattttgctatagactcattcatgttttttaggaatcagaatcatttcaggagaaaaccaactaagtagactttaattcttctctttctcattcttgccctttgagaaacccaagtggaatcatcacttaattacttactcaaattcaatgaatcaaatccaatccaatcagtgagaagaatagcttatctttcaaggtaatactttaccttagatctttgagggcatgcttcccatacaaagagcatcagaaaatcagggcaatcatctagatctcacagatcttcaacataggactctaggttatgagagctgaaccacatagctatcagtttcagtttttacttcctattgagtgtgtagaaacacagcctatggttttgctgtctgcagaagttaccataccctgtaaaagacaaatatttctttctcctctcgaaccactagtcagcctggatattcatgaaagctgaaagaaggggtgccaaaatgcctagctcctggatttagactcatggaatatgagaaaggcttagggaaaattcaagtcatggggagattcctgctaggtgatgccaggaatctcaatgacctgttgattagagggtctctggtcatttccacttgtgtgtggagaaatacatcatttgcatatgtatctagtcaagaagcccttttggagcaaagtggttgggaaactcatttactgggtccaccaaaggaaacccaattctgccatgtttttgcaaatactacacgtccctttgctctcaatagcaaaagtgatgttatagttttttttacttttgtcagaatcaaggcttcggccacctgtgcaatattttcccatggaatgcagcagtaaatccaagtaggtatatccgtgctcagagagaattctccatagttctgactcctgaaaaacaagtctcattagctctcatctagtttgatgactaaaagtgcacagcagttataccccagtggaagtgatttttctcacctagctgctctctaactcttacggctatctagttgtctgagctgctggtttgttttacttattctccaactgaactcattccaaaccaagaaaaaggaccaaatgaaattttcagttattatcatacttgctccttgaataagaatgctagagtctggaggcagaagaagactaagttaaaaaaaaaacagcctgaaggaattctggagtgagttttgtaagtctaattgtcaaagaagataaatggtctcagtatctgtagtaatttctggttaagcctagagggatcactgagtgccaatccaagcaggtggcactagaggcagattgttctcctagcatagagtgagtttccagctgctcatgacacattttcttatgattttccctaaaagaaaaccaaattttctactccacctcttcctttcctatcattccacttattgttgctgctttgctaacagccagcttagtaagccatcacacaagttagtgtgaggcttggttttaaaatagataacagagaatcttgattaaatagtatccaactttgtagcataacacagctaattcaggcaatgacatagagatgataagaaacaacatggtttggtagagggaacatttgatttagactctgcccatttttagctgtatgacttacataagtcattttgtgtccaagcctcattttctcccatatgaaaagtgaaggggttggattaaatgactaaaatccccttccagccctatgagcccaatgtattatgatctctgctttgtttccttcttaagaggcttcctactataaaatgtgacctatttacattttaagttgaagtagcccacaataatgaataatcaatttagatttttctcatctcctttgggagaaattaaattcaagcctctattcatttgatgttttacaacaagcttcaaagttggccatgttcattcacagtttgatattttgagacaccaataaaagttttttaataaaagttcccttgacttaaactcaccttcctaatagaagtagtgatttggctcacggaaaaatgtttccagagtcaacatgagaggactggatgaacctacagcctcactcaagctgttgcatcattgctgctgtagcaacagagccctctctgaatacccaaaacacacaattttctccaacaattctaattgcccacccagtatgggaatttgagagcctttggtgaataaccttgatcactcttttgaaatttggtacaacacttgcacaatcacggcaactgtttgtaaatatcttttcttctccgccagtatgtagacatgcacacccattcacaagtaagcccgcaaattcattttcacattttcctcttggtttgtttttatcatgggtatcacattgcaggaagagatgctctaacttacaagaatggaattttctgactatcattgccctcttcaaggcctgattagtttgtagggtggatgggatacaatgcatggtctacaaggtccatgtcaccagccatgatctttaaacaacctcttgcactttctggcactgctgcaatggcccatggtggacacctctgctgtttgtccaaacttctgctaaa

SEQ ID NO: 1359 - protein, 563 aa, Homo sapiens
MPKQVEVRMHDSHLGSEEPKHRHLGLRLCDKLGKNLLLTLTVFGVILGAVCGGLLRLDIHPDVVMLIAFPGDILMRMLKMLILPLIISSLITGLSGLDAKASGRLGTRAMVYYMSTTIIAAVLGVILVLAIHPGNPKLKKQLGPGKKNDEVSSLDAFLDLIRNLFPENLVQACFQQIQTVTKKVLVAPPPDEEANATSAVVSLLNETVTEVPEETKMVIKKGLEFKDGMNVLGLIGFFIAFGIAMGKMGDQAKLMVDFFNILNEIVMKLVIMIMWYSPLGIACLICGKIIAIKDLEVVARQLGMYMVTVIIGLIIHGGIFLPLIYFVVTRKNPFSFFAGIFQAWITALGTASSAGTLPVTFRCLEENLGIDKRVTRFVLPVGATINMDGTALYEAVAAIFIAQMNGVVLDGGQIVTVSLTATLASVGAASIPSAGLVTMLLILTAVGLPTEDISLLVAVDWLLDRMRTSVNVVGDSFGAGIVYHLSKSELDTIDSQHRVHEDIEMTKTQSIYDDMKNHRESNSNQCVYAAHNSVIVDECKVTLAANGKSADCSVEEEPWKREK

SEQ ID NO: 1360 - DNA, 7539 bp, Homo sapiens
ggtgacctagtgtcttccagtagggcaatctctggacatctttatctccccagtacctctccagatcctgaagcctggggccagggaggagaggttagatgtcagcagtggaaggacagtgccaacaatatgcccaagcaggtggaagtgcgaatgcacgacagtcatcttggctcagaggaacccaagcaccggcacctgggcctgcgcctgtgtgacaagctggggaagaatctgctgctcaccctgacggtgtttggtgtcatcctgggagcagtgtgtggagggcttcttcgcttggcatctcccatccaccctgatgtggttatgttaatagccttcccaggggatatactcatgaggatgctaaaaatgctcattctccctctaatcatctccagcttaatcacagggttgtcaggcctggatgctaaggctagtggccgcttgggcacgagagccatggtgtattacatgtccacgaccatcattgctgcagtactgggggtcattctggtcttggctatccatccaggcaatcccaagctcaagaagcagctggggcctgggaagaagaatgatgaagtgtccagcctggatgccttcctggaccttattcgaaatctcttccctgaaaaccttgtccaagcctgctttcaacagattcaaacagtgacgaagaaagtcctggttgcaccaccgccggacgaggaggccaacgcaaccagcgctgttgtctctctgttgaacgagactgtgactgaggtgccggaggagactaagatggttatcaagaagggcctggagttcaaggatgggatgaacgtcttaggtctgatagggtttttcattgcttttggcatcgctatggggaagatgggagatcaggccaagctgatggtggatttcttcaacattttgaatgagattgtaatgaagttagtgatcatgatcatgtggtactctcccctgggtatcgcctgcctgatctgtggaaagatcattgcaatcaaggacttagaagtggttgctaggcaactggggatgtacatggtaacagtgatcataggcctcatcatccacgggggcatctttctccccttgatttactttgtagtgaccaggaaaaaccccttctccttttttgctggcattttccaagcttggatcactgccctgggcaccgcttccagtgctggaactttgcctgtcacctttcgttgcctggaagaaaatctggggattgataagcgtgtgactagattcgtccttcctgttggagcaaccattaacatggatggtacagccctttatgaagcggtagccgccatctttatagcccaaatgaatggtgttgtcctggatggaggacagattgtgactgtaagcctcacagccaccctggcaagcgtcggcgcggccagtatccccagtgccgggctggtcaccatgctcctcattctgacagccgtgggcctgccaacagaggacatcagcctgctggtggctgtggactggctgctggacaggatgagaacttcagtcaatgttgtgggtgactcttttggggctgggatagtctatcacctctccaagtctgagctggataccattgactcccagcatcgagtgcatgaagatattgaaatgaccaagactcaatccatttatgatgacatgaagaaccacagggaaagcaactctaatcaatgtgtctatgctgcacacaactctgtcatagtagatgaatgcaaggtaactctggcagccaatggaaagtcagccgactgcagtgttgaggaagaaccttggaaacgtgagaaataaggatatgagtctcagcaaattcttgaataaactccccagcgtatcctatggtaactgatgatataaacaagctttctttaaaaaggaaaaaaatgcgtatatttctatgtttacttaatctgttagccgaggcttagaggagctcttgtgagtcagtgatgacaggcacggtgctgtgtctttgccaaataatgctttataaccgtctaattttctcacttgtattattatttgaatggatgctgctggaggaatcagttggaattgaagacacgttcttgccagcttcccttttctcccaagatgcagaaatgtggatgctcttttcccaggggacatgagtaaagcagtgtggtacactccagggacttgggaaaatgagcaaacacacagcgtgttattccttaaagtgttctccatgtctcgccttgttatgcacaagagattctattaaaagcctctagaagtaactccccttaaaatgtctagtaaagcttgcacatggattgattaaaagcaaatacctgtcttagggaattctgacaatttatcttccatatgctctttaagtaaaatgtttcaaagacagttttaaagggagccatgctcttaaaggcagttgattaaagaacctgttacatctctgccttaccctgtgtaatctgtgagaacaatggttgaaatttcaaagtatgtttcattattctttctaaatttgataattgattaggaagtattttatatataaccactgtagatattgacaaaagtaagagagcacagtcaacataaagtttaaccagagttaaatattcaaatttatttatgttcggtttgccttcacctggtgtagtaaaatcaaatgagattatttggtatgtgttttgctttgtttaacccaaaagattattttttggttcctaaagaaaaagatatttttaatctgtcaattatttcagtcatcatctcatcgtcctagaaagcctggtcattttactgtcctcacacatggaagacacttgtgttggctgtgcctcttttaatgtcatctcttgatgaaacaaaaatactggtatttatccaatatgttgaaagcgttttgttatcttctatcaaagcacataaaaccagttataggacacagttggaagcagagccagtcttcctcctcagtcttctcagtagaaaggaacagaaaacaaacatctgtgcaaaaccctataaaagtgatattcctatggcagagtccaggcagccttgaacaatgacatggcaacaaaggatggctctgtacaacttcacagatggaatcttgtttaaggctgtgaagttttaaggaataaataatataattggtgtagcacagtgccttgcatgcagtaggcagccaacaaatccttaatgattggtaatgcaagctaaaatttttaatgtctctactatccttttttattgaataacgcacagtattttcctaaggttgctgggtttgggagtaagcttgggacttgaatcattgagaaataaagcacatttgactctaagaagtatgtagaaccttgtttataggtgagaataggctgtattacatgaaaccagcggagggatgctgagacagtcatggtttatagaatccaaattctctgagatgagggtgcttatggacctcaaatagcctttcttatctgctccttgtgacttctctcttttaaatcagatacctttgaaacatacaagagacatgagattccagttgtttttgtctcctaaaccctagtgatttttggataaggatcactactgaacagtattaggcaacttttcatttttgcttttcaaatgacattggtctttatttccagtagatgggcagtaaacagggtcagggtggtcaagggatatgattaagtgtagtagtagaaaatgcattctttttttttttttttttttagacagagtcttgctctgttgctcaggctggagtacagtggcacgatctcagctcactgcactgcaatgtccacctctctagttcaagcgattctcctgtctcagcctcccgagtagctgggactacaggcacatgccaccatgcctggctaattttttgtatttttagtacagatgggtttcattatgttagccaggatggtctcgatctcctgacctcatgatccacccgccatggcctcccaaagtgctgggattacaggcgtgagccaccgtgcccggccagaaaatacattctttacagcaaatgttataggttaaggagacagttcctgggtttagctgtgaaactgtttaggattttctttaagtggtgttcccaagagcttttttctggtaagttggaggctataggcaaagcgtctaggagcttgttgttttttgctatggaaggccagctttgggatctatatacatgggcatgtttctcaatggagtggtcacaggattctcttctcagaactctgcctgaaacctttccggtgtgttttgtcttcaactttttcctagctatcctattagcctgtaaatatgtcagcagacaatgtgtttggaagaaacaaggtgtacaacttcacaaagcaagttttttctggtctgagacttactgtgtgcaggaagtctcgtgagaatatacttagaaaatcacacttatctggaaattcaataagtcatattaaaaatatacaatttcttgaactcaggactagcctgaaaatccaaaatgcatgtagagttgacatgttgacatatgtctatgtcctctgtttttatgtaagcctcatttatttctcccttgccatgcccatttgggattttctttgcccagcatatgtgccataaacagaacaaatggatccagggtatacctctaataacctttatctaaatagaatacatttaacctgtcaattatatgtatagatttatcctaattggttcaacatatatatgaatgcttgtaatagtctgttactatttgataatgcataaatgttatatttatatacagttacagcaggccagaaacatacatacactgcatcctgtaaggtctgtaaatcagggcttcggcaatgccattttgctatagactcattcatgttttttaggaatcagaatcatttcaggagaaaaccaactaagtagactttaattcttctctttctcattcttgccctttgagaaacccaagtggaatcatcacttaattacttactcaaattcaatgaatcaaatccaatccaatcagtgagaagaatagcttatctttcaaggtaatactttaccttagatctttgagggcatgcttcccatacaaagagcatcagaaaatcagggcaatcatctagatctcacagatcttcaacataggactctaggttatgagagctgaaccacatagctatcagtttcagtttttacttcctattgagtgtgtagaaacacagcctatggttttgctgtctgcagaagttaccataccctgtaaaagacaaatatttctttctcctctcgaaccactagtcagcctggatattcatgaaagctgaaagaaggggtgccaaaatgcctagctcctggatttagactcatggaatatgagaaaggcttagggaaaattcaagtcatggggagattcctgctaggtgatgccaggaatctcaatgacctgttgattagagggtctctggtcatttccacttgtgtgtggagaaatacatcatttgcatatgtatctagtcaagaagcccttttggagcaaagtggttgggaaactcatttactgggtccaccaaaggaaacccaattctgccatgtttttgcaaatactacacgtccctttgctctcaatagcaaaagtgatgttatagttttttttacttttgtcagaatcaaggcttcggccacctgtgcaatattttcccatggaatgcagcagtaaatccaagtaggtatatccgtgctcagagagaattctccatagttctgactcctgaaaaacaagtctcattagctctcatctagtttgatgactaaaagtgcacagcagttataccccagtggaagtgatttttctcacctagctgctctctaactcttacggctatctagttgtctgagctgctggtttgttttacttattctccaactgaactcattccaaaccaagaaaaaggaccaaatgaaattttcagttattatcatacttgctccttgaataagaatgctagagtctggaggcagaagaagactaagttaaaaaaaaaacagcctgaaggaattctggagtgagttttgtaagtctaattgtcaaagaagataaatggtctcagtatctgtagtaatttctggttaagcctagagggatcactgagtgccaatccaagcaggtggcactagaggcagattgttctcctagcatagagtgagtttccagctgctcatgacacattttcttatgattttccctaaaagaaaaccaaattttctactccacctcttcctttcctatcattccacttattgttgctgctttgctaacagccagcttagtaagccatcacacaagttagtgtgaggcttggttttaaaatagataacagagaatcttgattaaatagtatccaactttgtagcataacacagctaattcaggcaatgacatagagatgataagaaacaacatggtttggtagagggaacatttgatttagactctgcccatttttagctgtatgacttacataagtcattttgtgtccaagcctcattttctcccatatgaaaagtgaaggggttggattaaatgactaaaatccccttccagccctatgagcccaatgtattatgatctctgctttgtttccttcttaagaggcttcctactataaaatgtgacctatttacattttaagttgaagtagcccacaataatgaataatcaatttagatttttctcatctcctttgggagaaattaaattcaagcctctattcatttgatgttttacaacaagcttcaaagttggccatgttcattcacagtttgatattttgagacaccaataaaagttttttaataaaagttcccttgacttaaactcaccttcctaatagaagtagtgatttggctcacggaaaaatgtttccagagtcaacatgagaggactggatgaacctacagcctcactcaagctgttgcatcattgctgctgtagcaacagagccctctctgaatacccaaaacacacaattttctccaacaattctaattgcccacccagtatgggaatttgagagcctttggtgaataaccttgatcactcttttgaaatttggtacaacacttgcacaatcacggcaactgtttgtaaatatcttttcttctccgccagtatgtagacatgcacacccattcacaagtaagcccgcaaattcattttcacattttcctcttggtttgtttttatcatgggtatcacattgcaggaagagatgctctaacttacaagaatggaattttctgactatcattgccctcttcaaggcctgattagtttgtagggtggatgggatacaatgcatggtctacaaggtccatgtcaccagccatgatctttaaacaacctcttgcactttctggcactgctgcaatggcccatggtggacacctctgctgtttgtccaaacttctgctaaa

SEQ ID NO: 1361 - protein, 563 aa, Homo sapiens; identical to SEQ ID NO: 1359

SEQ ID NO: 1362 - DNA, 5578 bp, Homo sapiens
tccctggccggcgccgagccagagcgcagcggcctccaccgcctccccaggcgcgcacacacccgcacacgcgcacgcacgctcaccgtcctctgccaccactctctgctcccgccactcgccgcgcccgcgagccccgcagcaaagcacaggtggcagcggctgcaggggcgcatcgccggcgtgcgccctcctgcagccctgggcgcatcgctctctcggggaagccaccctcggagcccccggagctccccgccaagcgccatccccgcgggcggaggggagcgcgggtcgcgcgccgtggagagccgggacgcggattagcgcccgcaggagcctcctgcgcccgttgaggcgctaaagggcttaccccggaggcgggtggaagggcgggcagaggctcctcttaaataccgctcccggccgcacttcgcgctcaccccggcgtccgctttctccctcgcccacagctgccggatagtgctgaagaggagggggcgttccccagaccatggcatctacggaaggtgccaacaatatgcccaagcaggtggaagtgcgaatgcacgacagtcatcttggctcagaggaacccaagcaccggcacctgggcctgcgcctgtgtgacaagctggggaagaatctgctgctcaccctgacggtgtttggtgtcatcctgggagcagtgtgtggagggcttcttcgcttggcatctcccatccaccctgatgtggttatgttaatagccttcccaggggatatactcatgaggatgctaaaaatgctcattctccctctaatcatctccagcttaatcacagggttgtcaggcctggatgctaaggctagtggccgcttgggcacgagagccatggtgtattacatgtccacgaccatcattgctgcagtactgggggtcattctggtcttggctatccatccaggcaatcccaagctcaagaagcagctggggcctgggaagaagaatgatgaagtgtccagcctggatgccttcctggaccttattcgaaatctcttccctgaaaaccttgtccaagcctgctttcaacagattcaaacagtgacgaagaaagtcctggttgcaccaccgccggacgaggaggccaacgcaaccagcgctgttgtctctctgttgaacgagactgtgactgaggtgccggaggagactaagatggttatcaagaagggcctggagttcaaggatgggatgaacgtcttaggtctgatagggtttttcattgcttttggcatcgctatggggaagatgggagatcaggccaagctgatggtggatttcttcaacattttgaatgagattgtaatgaagttagtgatcatgatcatgtggtactctcccctgggtatcgcctgcctgatctgtggaaagatcattgcaatcaaggacttagaagtggttgctaggcaactggggatgtacatggtaacagtgatcataggcctcatcatccacgggggcatctttctccccttgatttactttgtagtgaccaggaaaaaccccttctccttttttgctggcattttccaagcttggatcactgccctgggcaccgcttccagtgctggaactttgcctgtcacctttcgttgcctggaagaaaatctggggattgataagcgtgtgactagattcgtccttcctgttggagcaaccattaacatggatggtacagccctttatgaagcggtagccgccatctttatagcccaaatgaatggtgttgtcctggatggaggacagattgtgactgtaagggacaggatgagaacttcagtcaatgttgtgggtgactcttttggggctgggatagtctatcacctctccaagtctgagctggataccattgactcccagcatcgagtgcatgaagatattgaaatgaccaagactcaatccatttatgatgacatgaagaaccacagggaaagcaactctaatcaatgtgtctatgctgcacacaactctgtcatagtagatgaatgcaagggcccttttgtgctgagaataaaaccagctattggaacagacctcactgctttgtagagtcagaagttgacctagagaatgggtagcaacaggtcctcagtttctctggagacacccccaatccttgggtgagtgttgaaacctgacaactgactgttagccttgtcatcatcctcactggagatggagatgttgcagtcggagcctcactccttctggggcactgtttcttctcatggcaaccattttgcctgcctggaaacagcctgttgcctttgctagggggcaaatacacacactagccaaggaagttggtccagcacatctctgaggtttctcccccatggacccatggagcgaattccctgagataaatgatcagaaagttggctgtctggtggtttaatactccataagagttacttcccttatagaaagtcatcctttggcatctagatttttctacaaatcaccttaactccctccctttctctttctcctggaaaacctcagcattgcatctccatgttgcacaacacagatcagattatctggtcactatagagatttgtatataaaaaaactacttttttgaggattttgtatattgtttttctatttgttttctacagcttgaggaaagagctggcaaactgtgaatctaacttgatcttgttgccagcagatatattttggcttcctggtaagagtctgtgttaccagggacaatatattgccctctgatcagtattgcaccctaaatccacaaattcctccagcccagtcttacatttttttaaacaaatcccctagcttgtttgctattatttataaagagcattagaaaatgtatttatagacctggatgttatatgtttaatattaatttagcctttaataatgttataggtttgtaactattcttcagaaattataaagaactcagtgtagactgaattaatctatttagtatctgtaattttgcagacatattttcttacagtattttctatgtaaccacacatgtagaattataactaattagagcacaagaagtttcttcagcaatttagagctaccaattgtttcttgactatatagtcacatttgacaaatttaagaacccagtctttagtgatgcaataaacaaaatgaaccattaagaacaaggaattgcttaaatcccttagctggtgaggatatacatctaaataattcatctttctaactcaaggaatggtgctgattttttaaatgtttgacaccaggccttgtttttccagctgagcattctcattttgcttttctctaagactatcaaagacaaggtattaatagtaggattattcctagatcagaatgtttcatacattcctaaaggtttatgtggaaattggcttaggaaaactttgagtagcagagactgaggatgagtgctagagatgaaatcaggacagatttgttgcagttaattcttgccaagcaaattagtggtaaatgtcacattgttatgtgaattgagcacatatttttaaagaaagtttacaaaaaatttttagaaccaactatgaggcaatactgtatcactgggggctgggagtgggggcttagaatcatactgaaattgtttaaaagcagcccaggtagtttctgtcctcaggtgaataacagactatataacttccccgaaaggtaaaacgatagccactgcagagacgaggtgtcttccttccaccaaatactttctgagatggtggtaggagtagtatttttaccgtgctcttcattaaacaaacagattagatgtaccctcgactggcaataattgtatctattttcaagtacagctagctgtcaaagcatgaagctcttgtgtatacacactgacacttggttcacgcatgaagaacagtgcctatgcactttgtgtagctataatgtaggtatctaggtgtaatttcagtgaaatggtgtatagatgtattgtaatttaaatgtatatgttatttttggctattcatctaaatgcagtagacatgttgatcggtgttttgcaaacatttctttttccttcttagataactagtcgtgaatcatttctcctctttctcagtgtggcttgggaatatatatgagtgaagaatttatctgtgaatcctttgtactgatgattgtttgaaagtctgtgtgtgtccagcacctttgtaaatacacaattcagagcagggatgggctgggtgtgtgtcctggttcttagtgaaaggtcatctcatgtctgtttaatacatggtgaatgcaactgtggaacttttgattacctagacttaggtaggtttagaatgagaacatccatctacagtcctcctttgcttggtggattgggctcagaggaacaaaaagttagtctgactctgtgcatattagcatcatgtctttagagaaaggtcagcctctctggttgccaaatactcatcatgatgctcatgacttaaaggttctgaggagccttgtctcccttggatttttgagtcagggtacaggaaaaaacattgctgactaactaactgcaaatgcatctgcaggtgaaaccctacgaaagcacagttctggctataaacttcagagttctctgtaaaaaacttagagcactagaagcacaggaatagtgagtgtacagcttatgcggttgtagaggggcaactgatgaacacaggtcccacatatatgagggagtatgacgttctctacctaatatgttctgtgtgcatgttttgaatgattgaagatgggattaactaatgcaagtttacagttgcctcctaaaacacacattctgtataattatcgctaaatacaatgctgtgaggtctatagttcctgtaacccctttctcctccccaaggacagagaagaactagccatgtgctatagggaaccctgagtgccctactcttttcccaagaagggtaaagcctacaatatcatcagggggcatgaagcacattaatttgcagtggctgcttcatatgaggagatatggtggacaggctaatttttccttgaaaatgtggcttcttcaactcctttcaaatttaggatggaatacttcctgaaataaaactgggctttatgcaggattctctttgaaaattcttgtatgtccagaacaaaagataaaactaattgtattcctcacattcacaatccccattggtctgaagtcacgtagcacagagcatctatagcacatagtgtttaaagactaatgaatgcaaaaagataaaatcttcaactaatttttgaattgtttctcatatatgctactagaaaatgccttgttgatgaagcacattttgggtagttgaggtcttttgttttcgcctttagctttctaagctttcttacaatgtggactgattactgtaacatttcacgtgtaaaataactggatattctttatatactggaaataacctgtgaatccaatatttcactaagtgttttaacttttgtgtatatatctctcatcaataaatgtggatttcaatt

SEQ ID NO: 1363 - protein, 522 aa, Homo sapiens
MASTEGANNMPKQVEVRMHDSHLGSEEPKHRHLGLRLCDKLGKNLLLTLTVFGVILGAVCGGLLRLDIHPDVVMLIAFPGDILMRMLKMLILPLIISSLITGLSGLDAKASGRLGTRAMVYYMSTTIIAAVLGVILVLAIHPGNPKLKKQLGPGKKNDEVSSLDAFLDLIRNLFPENLVQACFQQIQTVTKKVLVAPPPDEEANATSAVVSLLNETVTEVPEETKMVIKKGLEFKDGMNVLGLIGFFIAFGIAMGKMGDQAKLMVDFFNILNEIVMKLVIMIMWYSPLGIACLICGKIIAIKDLEVVARQLGMYMVTVIIGLIIHGGIFLPLIYFVVTRKNPFSFFAGIFQAWITALGTASSAGTLPVTFRCLEENLGIDKRVTRFVLPVGATINMDGTALYEAVAAIFIAQMNGVVLDGGQIVTVRDRMRTSVNVVGDSFGAGIVYHLSKSELDTIDSQHRVHEDIEMTKTQSIYDDMKNHRESNSNQCVYAAHNSVIVDECKGPFVLRIKPAIGTDLTAL

SEQ ID NO: 1364 - DNA, 7948 bp, Homo sapiens
tccctggccggcgccgagccagagcgcagcggcctccaccgcctccccaggcgcgcacacacccgcacacgcgcacgcacgctcaccgtcctctgccaccactctctgctcccgccactcgccgcgcccgcgagccccgcagcaaagcacaggtggcagcggctgcaggggcgcatcgccggcgtgcgccctcctgcagccctgggcgcatcgctctctcggggaagccaccctcggagcccccggagctccccgccaagcgccatccccgcgggcggaggggagcgcgggtcgcgcgccgtggagagccgggacgcggattagcgcccgcaggagcctcctgcgcccgttgaggcgctaaagggcttaccccggaggcgggtggaagggcgggcagaggctcctcttaaataccgctcccggccgcacttcgcgctcaccccggcgtccgctttctccctcgcccacagctgccggatagtgctgaagaggagggggcgttccccagaccatggcatctacggaaggtgccaacaatatgcccaagcaggtggaagtgcgaatgcacgacagtcatcttggctcagaggaacccaagcaccggcacctgggcctgcgcctgtgtgacaagctggggaagaatctgctgctcaccctgacggtgtttggtgtcatcctgggagcagtgtgtggagggcttcttcgcttggcatctcccatccaccctgatgtggttatgttaatagccttcccaggggatatactcatgaggatgctaaaaatgctcattctccctctaatcatctccagcttaatcacagggttgtcaggcctggatgctaaggctagtggccgcttgggcacgagagccatggtgtattacatgtccacgaccatcattgctgcagtactgggggtcattctggtcttggctatccatccaggcaatcccaagctcaagaagcagctggggcctgggaagaagaatgatgaagtgtccagcctggatgccttcctggaccttattcgaaatctcttccctgaaaaccttgtccaagcctgctttcaacagattcaaacagtgacgaagaaagtcctggttgcaccaccgccggacgaggaggccaacgcaaccagcgctgttgtctctctgttgaacgagactgtgactgaggtgccggaggagactaagatggttatcaagaagggcctggagttcaaggatgggatgaacgtcttaggtctgatagggtttttcattgcttttggcatcgctatggggaagatgggagatcaggccaagctgatggtggatttcttcaacattttgaatgagattgtaatgaagttagtgatcatgatcatgtggtactctcccctgggtatcgcctgcctgatctgtggaaagatcattgcaatcaaggacttagaagtggttgctaggcaactggggatgtacatggtaacagtgatcataggcctcatcatccacgggggcatctttctccccttgatttactttgtagtgaccaggaaaaaccccttctccttttttgctggcattttccaagcttggatcactgccctgggcaccgcttccagtgctggaactttgcctgtcacctttcgttgcctggaagaaaatctggggattgataagcgtgtgactagattcgtccttcctgttggagcaaccattaacatggatggtacagccctttatgaagcggtagccgccatctttatagcccaaatgaatggtgttgtcctggatggaggacagattgtgactgtaagcctcacagccaccctggcaagcgtcggcgcggccagtatccccagtgccgggctggtcaccatgctcctcattctgacagccgtgggcctgccaacagaggacatcagcctgctggtggctgtggactggctgctggacaggatgagaacttcagtcaatgttgtgggtgactcttttggggctgggatagtctatcacctctccaagtctgagctggataccattgactcccagcatcgagtgcatgaagatattgaaatgaccaagactcaatccatttatgatgacatgaagaaccacagggaaagcaactctaatcaatgtgtctatgctgcacacaactctgtcatagtagatgaatgcaaggtaactctggcagccaatggaaagtcagccgactgcagtgttgaggaagaaccttggaaacgtgagaaataaggatatgagtctcagcaaattcttgaataaactccccagcgtatcctatggtaactgatgatataaacaagctttctttaaaaaggaaaaaaatgcgtatatttctatgtttacttaatctgttagccgaggcttagaggagctcttgtgagtcagtgatgacaggcacggtgctgtgtctttgccaaataatgctttataaccgtctaattttctcacttgtattattatttgaatggatgctgctggaggaatcagttggaattgaagacacgttcttgccagcttcccttttctcccaagatgcagaaatgtggatgctcttttcccaggggacatgagtaaagcagtgtggtacactccagggacttgggaaaatgagcaaacacacagcgtgttattccttaaagtgttctccatgtctcgccttgttatgcacaagagattctattaaaagcctctagaagtaactccccttaaaatgtctagtaaagcttgcacatggattgattaaaagcaaatacctgtcttagggaattctgacaatttatcttccatatgctctttaagtaaaatgtttcaaagacagttttaaagggagccatgctcttaaaggcagttgattaaagaacctgttacatctctgccttaccctgtgtaatctgtgagaacaatggttgaaatttcaaagtatgtttcattattctttctaaatttgataattgattaggaagtattttatatataaccactgtagatattgacaaaagtaagagagcacagtcaacataaagtttaaccagagttaaatattcaaatttatttatgttcggtttgccttcacctggtgtagtaaaatcaaatgagattatttggtatgtgttttgctttgtttaacccaaaagattattttttggttcctaaagaaaaagatatttttaatctgtcaattatttcagtcatcatctcatcgtcctagaaagcctggtcattttactgtcctcacacatggaagacacttgtgttggctgtgcctcttttaatgtcatctcttgatgaaacaaaaatactggtatttatccaatatgttgaaagcgttttgttatcttctatcaaagcacataaaaccagttataggacacagttggaagcagagccagtcttcctcctcagtcttctcagtagaaaggaacagaaaacaaacatctgtgcaaaaccctataaaagtgatattcctatggcagagtccaggcagccttgaacaatgacatggcaacaaaggatggctctgtacaacttcacagatggaatcttgtttaaggctgtgaagttttaaggaataaataatataattggtgtagcacagtgccttgcatgcagtaggcagccaacaaatccttaatgattggtaatgcaagctaaaatttttaatgtctctactatccttttttattgaataacgcacagtattttcctaaggttgctgggtttgggagtaagcttgggacttgaatcattgagaaataaagcacatttgactctaagaagtatgtagaaccttgtttataggtgagaataggctgtattacatgaaaccagcggagggatgctgagacagtcatggtttatagaatccaaattctctgagatgagggtgcttatggacctcaaatagcctttcttatctgctccttgtgacttctctcttttaaatcagatacctttgaaacatacaagagacatgagattccagttgtttttgtctcctaaaccctagtgatttttggataaggatcactactgaacagtattaggcaacttttcatttttgcttttcaaatgacattggtctttatttccagtagatgggcagtaaacagggtcagggtggtcaagggatatgattaagtgtagtagtagaaaatgcattctttttttttttttttttttagacagagtcttgctctgttgctcaggctggagtacagtggcacgatctcagctcactgcactgcaatgtccacctctctagttcaagcgattctcctgtctcagcctcccgagtagctgggactacaggcacatgccaccatgcctggctaattttttgtatttttagtacagatgggtttcattatgttagccaggatggtctcgatctcctgacctcatgatccacccgccatggcctcccaaagtgctgggattacaggcgtgagccaccgtgcccggccagaaaatacattctttacagcaaatgttataggttaaggagacagttcctgggtttagctgtgaaactgtttaggattttctttaagtggtgttcccaagagcttttttctggtaagttggaggctataggcaaagcgtctaggagcttgttgttttttgctatggaaggccagctttgggatctatatacatgggcatgtttctcaatggagtggtcacaggattctcttctcagaactctgcctgaaacctttccggtgtgttttgtcttcaactttttcctagctatcctattagcctgtaaatatgtcagcagacaatgtgtttggaagaaacaaggtgtacaacttcacaaagcaagttttttctggtctgagacttactgtgtgcaggaagtctcgtgagaatatacttagaaaatcacacttatctggaaattcaataagtcatattaaaaatatacaatttcttgaactcaggactagcctgaaaatccaaaatgcatgtagagttgacatgttgacatatgtctatgtcctctgtttttatgtaagcctcatttatttctcccttgccatgcccatttgggattttctttgcccagcatatgtgccataaacagaacaaatggatccagggtatacctctaataacctttatctaaatagaatacatttaacctgtcaattatatgtatagatttatcctaattggttcaacatatatatgaatgcttgtaatagtctgttactatttgataatgcataaatgttatatttatatacagttacagcaggccagaaacatacatacactgcatcctgtaaggtctgtaaatcagggcttcggcaatgccattttgctatagactcattcatgttttttaggaatcagaatcatttcaggagaaaaccaactaagtagactttaattcttctctttctcattcttgccctttgagaaacccaagtggaatcatcacttaattacttactcaaattcaatgaatcaaatccaatccaatcagtgagaagaatagcttatctttcaaggtaatactttaccttagatctttgagggcatgcttcccatacaaagagcatcagaaaatcagggcaatcatctagatctcacagatcttcaacataggactctaggttatgagagctgaaccacatagctatcagtttcagtttttacttcctattgagtgtgtagaaacacagcctatggttttgctgtctgcagaagttaccataccctgtaaaagacaaatatttctttctcctctcgaaccactagtcagcctggatattcatgaaagctgaaagaaggggtgccaaaatgcctagctcctggatttagactcatggaatatgagaaaggcttagggaaaattcaagtcatggggagattcctgctaggtgatgccaggaatctcaatgacctgttgattagagggtctctggtcatttccacttgtgtgtggagaaatacatcatttgcatatgtatctagtcaagaagcccttttggagcaaagtggttgggaaactcatttactgggtccaccaaaggaaacccaattctgccatgtttttgcaaatactacacgtccctttgctctcaatagcaaaagtgatgttatagttttttttacttttgtcagaatcaaggcttcggccacctgtgcaatattttcccatggaatgcagcagtaaatccaagtaggtatatccgtgctcagagagaattctccatagttctgactcctgaaaaacaagtctcattagctctcatctagtttgatgactaaaagtgcacagcagttataccccagtggaagtgatttttctcacctagctgctctctaactcttacggctatctagttgtctgagctgctggtttgttttacttattctccaactgaactcattccaaaccaagaaaaaggaccaaatgaaattttcagttattatcatacttgctccttgaataagaatgctagagtctggaggcagaagaagactaagttaaaaaaaaaacagcctgaaggaattctggagtgagttttgtaagtctaattgtcaaagaagataaatggtctcagtatctgtagtaatttctggttaagcctagagggatcactgagtgccaatccaagcaggtggcactagaggcagattgttctcctagcatagagtgagtttccagctgctcatgacacattttcttatgattttccctaaaagaaaaccaaattttctactccacctcttcctttcctatcattccacttattgttgctgctttgctaacagccagcttagtaagccatcacacaagttagtgtgaggcttggttttaaaatagataacagagaatcttgattaaatagtatccaactttgtagcataacacagctaattcaggcaatgacatagagatgataagaaacaacatggtttggtagagggaacatttgatttagactctgcccatttttagctgtatgacttacataagtcattttgtgtccaagcctcattttctcccatatgaaaagtgaaggggttggattaaatgactaaaatccccttccagccctatgagcccaatgtattatgatctctgctttgtttccttcttaagaggcttcctactataaaatgtgacctatttacattttaagttgaagtagcccacaataatgaataatcaatttagatttttctcatctcctttgggagaaattaaattcaagcctctattcatttgatgttttacaacaagcttcaaagttggccatgttcattcacagtttgatattttgagacaccaataaaagttttttaataaaagttcccttgacttaaactcaccttcctaatagaagtagtgatttggctcacggaaaaatgtttccagagtcaacatgagaggactggatgaacctacagcctcactcaagctgttgcatcattgctgctgtagcaacagagccctctctgaatacccaaaacacacaattttctccaacaattctaattgcccacccagtatgggaatttgagagcctttggtgaataaccttgatcactcttttgaaatttggtacaacacttgcacaatcacggcaactgtttgtaaatatcttttcttctccgccagtatgtagacatgcacacccattcacaagtaagcccgcaaattcattttcacattttcctcttggtttgtttttatcatgggtatcacattgcaggaagagatgctctaacttacaagaatggaattttctgactatcattgccctcttcaaggcctgattagtttgtagggtggatgggatacaatgcatggtctacaaggtccatgtcaccagccatgatctttaaacaacctcttgcactttctggcactgctgcaatggcccatggtggacacctctgctgtttgtccaaacttctgctaaa

SEQ ID NO: 1365 - protein, 572 aa, Homo sapiens
MASTEGANNMPKQVEVRMHDSHLGSEEPKHRHLGLRLCDKLGKNLLLTLTVFGVILGAVCGGLLRLDIHPDVVMLIAFPGDILMRMLKMLILPLIISSLITGLSGLDAKASGRLGTRAMVYYMSTTIIAAVLGVILVLAIHPGNPKLKKQLGPGKKNDEVSSLDAFLDLIRNLFPENLVQACFQQIQTVTKKVLVAPPPDEEANATSAVVSLLNETVTEVPEETKMVIKKGLEFKDGMNVLGLIGFFIAFGIAMGKMGDQAKLMVDFFNILNEIVMKLVIMIMWYSPLGIACLICGKIIAIKDLEVVARQLGMYMVTVIIGLIIHGGIFLPLIYFVVTRKNPFSFFAGIFQAWITALGTASSAGTLPVTFRCLEENLGIDKRVTRFVLPVGATINMDGTALYEAVAAIFIAQMNGVVLDGGQIVTVSLTATLASVGAASIPSAGLVTMLLILTAVGLPTEDISLLVAVDWLLDRMRTSVNVVGDSFGAGIVYHLSKSELDTIDSQHRVHEDIEMTKTQSIYDDMKNHRESNSNQCVYAAHNSVIVDECKVTLAANGKSADCSVEEEPWKREK

SEQ ID NO: 1366 - DNA, 40049 bp, Mus musculus
  misc_feature (1)...(40049): n = A,T,C or G
tgacatttagggaaggagtatgtgggcagaccactccaaatatgaagatatttgtgtctcatttagttgatcaccaatacttgcatcagccaaggattttaatagccaaatatataggttgactggtgagtgctaattcatttcctattccttcctcattattggctcatggggcacatgaccatacttgccatggtggcacagatgggaggtgcacatgggttcaacagcatggacttcttttcaccaagactgacctggtgcagttgctgctcggtgttaaatctggcaactatagagactatctctgtgttcctggtatcatgccattctgtagcatgatgagccagaagctaggtgataggtggattgcatcagttcacttctatagtaaagaatggtgaccaatcccttccggtccactccaacaatggggtgccttgtcctctgagtctccggacacccgcaaggacccacacaggatcccccatggcatcctaagacctctggtgagtggaacacaacttcagccaggaggcaggttcaaacaccagatatctgggcaccttccctgcaagaggagagcttgcttgcagagagtactctgatcactgaaactaaggagagacctagtctcccaggtctgctgctagaggctaacttaatcacccgaggaacaagctctaaccagagaaaactataacaactagcttcagagattaccagatagcgaaaggcaaaggtaagaatcctactaacagaaatcaagaccactcaccatcatcagaacacagcactcccaccccacctagtcctgggcaccccaacacacccaaaaagctagacccggatttaaaagcatatctcatgatgatggtagaggacatcaagtaggactttaataactcacttaaagaaatacaggagaacactgctaaacaggtaaaagaccttaaagaggaaccacaaaaattccttaaagaattgcaggaaaacacgaccaaacaggtgatggaattgaataaaaccatccaagacataaaaaggtaagtagacacaatagagaaaacccaaagtgaggcaaagctggagatagaaaccctaggaaagaaatctggaaccatagatgtgagaaaccctaggaaagaaatctggaaccatagatgggaacatcagcaacagaatacaagagatggaagagagaatctcaggtgcaaaagattccatagagaacatcggcacaacaatcaaaaaaaatacaaaacacaaaaagatcctaactcaaaacatccaggaaatccaggacacaatgagaagaccaaatctatggatactaggagttgatgagaatgaagattttcaacttaaagggccagcaaataacttcaacaaaattatagaagaaaacttcccaaacctaaagaatgacatgcccatgaacatacaagaagcttacagaactctaaatagactggaccaaaaaagaaattcctccggacacataataatcagaacaacaaatgcactaaataaagagagaatattaaaagcattaagggagaaaactcaagtaacatataaagtcaggcctattagaattacaccagacttttcactagagactatgaaagtcagaagagcctgggcagatgttatacagacactaagagaacacaaatgccagcccaggctactatacccggccaaactctcaattaccatagatggagaaaccaaagtattccacgacaaaaccaaatttacacattacctttccacgaatccagcccttcaaaggataataacagaaaaaaaccaatacaaggacggaaatcacgccttagaaaaagcaagaaagtaatccctcaacaaaccaaaaagaagacagccacaaaaacagaatgccaactctaaaaacaaaaatgataggaagcaacaattacttttccttaatatctcttaatatcaatggactcaattccccagtaaaaagacatagactaacagactggctacacacacaggacccaacattctgctgcttacaggaaacccatctcagggaaaaagacagacactacttcaaagtgaaagtctggaaaacaattttccaaggaaatggtctgaagaaacaagctggagtagccattctaatatctaataaaatcgacttccaacccaaagttatcaaaaaagacaaggagggacacttcatactcatcaaaggtaaaatcctccaagaggaactctcaattctgaatatctatgctccaaatgcaagggcagccacattcattaaagacactttagtaaagctcaaagcacatattgcacctcacacaataatagtgggagacttcaacacaccactttcatcaatggacagatcgtggaaacagaaactaaacagggacacagtgaaactaacagaagttatgaaacaaatggacttaacagatatctacagaacattttatcctaaaacaacaggatatacattcttctcagcacctcacggggccttctccaaaattgaccatataattggtcacaaaacaggcctcaacagatacaaaaatattgagattgtcccatgcatcctatcagaccactatggactaaggctgatcttcaataataacataaataatggaaagccaacattcatgtggaaactgaacaacactcttctcaatgttctcttctcaactgaacaacacttcttctcttcttccgtggtcaacgaaggaataaagaaagaaatcaaagactttttagagtttaatgaaaatgaagccacaacatacccaaacctatgggacactatgagagcatttctaagagggaaactcatagctctgagtgcctccaaaaagaaactagagagagcacacactagcagcttgacaacacatctaaaagcactagaaaaaaaggaagaaaattcacccaataagagtagacggcagaaaataatcaaactcaggggtgaaatcaaccaagtggaaacaagaagaactattcaaagaattaaccaaacgaggagttggttctttgagaaaatcaacaagatagataaacccttagctagactcactagaggccacaaggacagcatcctaattagcaaaatcagaaatgaaaagggagacataacaacagatcctgaagaaatccaaaacaccatcagatccttctacaaaaggctatactcaacaaaactggaaaacctggacgaaatggacaaatttctagacagatgccaggtaccaaagttaaatcaggatcaagtaaatgatataaatagtcacatatcctctaatgaaatagaagcagtcattaatagtctcccagccaaaaaagcccaggaccagattggtttagtgcagagttctaccagaccttcaaagaagatctaattccagttctgcacaaactattccaaaaatagaagtggaaggtactctacccaactcattctacgaagccacaattactctgatacctaaaccacagaaagatccaacaaagatagagaacttcagaccaatttcccttatgaatatcgatgcaaaaatacttaataaaattctcgctaaccgaatccatgaacacatgaaagcaatcatccatcctgatcaagtaggttttgttccagggatgcagggatggtttaatatatggaaatccatcaatgtaatccattatataaacaactcaaagacaaaaaccacatgatcatctcgttagatgcagaaaaagcatttgacaagatccaacacccattcatgataaaagtcttggaaagatcaggaattcaaggcccatacctaaacatgataaaagcaatctacagcaaaccaatagccaacatcaaagtaaatggagagaggctggaagcaatcccactaaaatcagggactagacaaggctgcccactttctccctacctattcaacatagtacttgaagtattagccagagcaattcgacaacaaaaggagatcaaggggatacaaattggaaaagatgaagtaaaaatatcactttttgaagatgatatgatagtatatataagtgaccctaaaaattccaccagagaactcctaaacctgataaatagcttcggtgaagtagctggatataaaattaactcaaacaagtcaatggactttctctacacaaagaataatcaggctgagaaagaaattagggaaacaacacccttctcaatagtcacaaaaaatataaaatatcttggcgtgactctaactaaggaagtgaaagatctgtataataaaaacttcaagtctctgaagaaagaaattaaagaagatctcagaatatggaaagatctcccatgctcatggattggcaggatcaacattgtaaaaatggctatcttgccaaaagcaatctacagattcaatgcaatccccatcaaaattccaactcaatttttccatgaattagaaagagcaatctgcaaattcatctggaataacaaaaaacctaggatagcaaaaactcttctcaaggataaaagaacttctggtggaatcaccatccctgacctaaagctttactacagatcaattgtgattaaaaactgcatggtactggtatagtgacatacaagtagaccaatggaatagaattgaagacccagaaatgaacccacacacctatggtcacttgatcttcctcagtggaagaaagacagcattttcaacaaatggtgctggcacaactggcggttatcatgtagaagaatgtgaattgatccatttctatctccttgtactaaggtcaaatctaagtggatcaaggaactccacataaaaccagagacactgaaacttatagaggagaaagtggggaaaagcctcgaagatatgggcacaggggaaaaattcctgaatagaacatcaatggcttgtgctgtaagatcgagaattgacaaatgggacctcatgaaactgcaaagcttctgcaaggcaaaagacattgtcaataagacaaaaaggccaccaacagattgggaaagaatctttacctatcctaaatcagataggggactaatatccaatatatataaagaactcaagaaggtgggctccagaaaatcaaataaccccattaaaaatggggctcagagctaaacaaagaattctcacctgagggataccgaatgcctgagaagcacctgaaaaaatgttcagcatccttaatcatcagggaaatgcaaatcaaaacaaccctgagattccatctcacaccagtcagaatggctaagatcaaaaattcaggtgacagcagatgctggcaaggatgtggagaaagaggaatactcctccattgttgctgggattgcaaggttatacaaccactctggaaatcagtctggcggatcctcagaaaattggacatagtactacgggaggatctcacaatacctctgaacctcagctctccctcaaggtggatcctgtcttccaacctttatatatgtacatttatgtagaagtaactgtgtaggtcccaggaaactagaaaggatcacgtgataaaggggaaaacggaatctttagtggaagtagaatgtctgtgattgaaaggggaatgctgggagtggagaggtgtgaggaagtgtggccaggacacagaggagaggagtcaacacaaactaaggatgcttgaaaacaccacacggaaacatgagttgtcataggggaacaaacataaagtaaacagtttaaatagacgaacctccagtaggtagaaaaagctgttaagtaaccctgagtcctgcaaaacacatgaaactgaagaagaatgaagaccaaagtgtggacactttgccccttcttagaattggaaataatcacccatggaaggagttacagagacaaagtttggagctgagacaaaaggatggatcatctagagactgccatatccagggatccatcccataattagcctccaaacgatgacaccattgcttacactagtaagcgtttgctgaaaggaccctgatatagctgtctcttgtgagactaggacagggcctagcaaatacataagtggatgctcacaatcagctattggatggatcacagggcccccaatggaggagctagagaaagtatccaaggagctaaagagatctgcaaccctgtaagtgcaacaacattatgaactaaccagtaccccggagctcttgactctagctgtgtatgtatcaaaagatggcctagtcggccatcactggaaagagaggcccattggacacccaaactttatatgccccagtacaggggaacgctatgggccaaaaagtgggaatgggtgggaaggtggttgggggggagggtatgggggacttttgggatagcattggaaatgtaattgaggaaaatacgtaataaaaaatattaaaagaaaaacaaaaaacttaagtatagattaatggaattataacatcaaaaataaattataatagtaaagttaaaaaaaaaaaagaatggcagtgatttgttcccattttaagagatacttcttctggtgatggatttgcctttcctgaaggtcaatgattcagacaaagtacaattttttggattaataagagcttttgtagtattccacatattgtttctgaccaaagaactcacttcatatagataaggaagtacaatgattgggttattagttacacttgtattgctgtgataaaataccatgaccagaagtaacttaaaagaaataaagtttatttttacttatggttacagagagctacatccagaatggcagggttggcatggtatcagacaggcatggcagcaggaacagggagctgggagctcacatagcaatcacacacagggagcagagagaaacaggaaattgggtgggggtgtaagccctcaaataccagccttgagatgtacttccttcagtaaggctgaacctagacattctatgatctccccaaactgcaccaccagctgttggtcgttgttgaaatgcacagacccatgaggaacatttctcattcaaaccaccatgttctccatcagcatgaagcaactgacttgaataaaaggtaggatggctttttgttgttgttgttgttgtttttgtttttttgagacagggtttctctgtgtcgccctggctgtcctggaattcactttgtagacaggctggccttgaactcagaaatctgcctgcctctacctcccaagtactgggattaaaggcatgcgccaccaccgcccagcaggatggctcttttttaaagaaatagatacagtgcaggaaaatgaataggaacagaaactatattgaggtaactgaacttcagctctccctcaaggtggatcctgtcttccaacatttatatatgtacatttatgtagaagtaactgtgtaggtcccaggaaactagaaaggatcacatgataaaggggaaaacggaatctttagtggaagtagaatgtctgtgattgaaaggggaatgctgggagtggagaggtgtgaggaagtgtggccaggacacagaggagaggagtcaacacaaactaaggatgcttgaaaacaccacacggaaacatgagttgtcataggggaacaaacataaagtaaacagtttaaatagacgaacctccagtaggtagaaaaagctgttaagtaaccctgagtcctgggttgtttaataaaaacctgtgtcagggataagattcttccctatgggttgttggtcaggagtctcatgggagggggcaagacctgcctctgctactgtttgctcaccaggactaggtagcaaaaccagattgctgaagatgccccatcttttgatcacaagacatagaaaaccaagttagaacttggctagaaatctcttccttgctggctatctcttccaaagccaaaaggtgctacgcaggctgttgggggagaattgttattcacactcttacttagctgtggaccctgtgcacaacaatactgacagactagataagataaacccaccagtacaatagtggttgtggttaggttttgtatcaaccaccaggaaggaattcacagttaaaggcctgtggttagggaggttagtttcccaatagggaagtactgctgttggtgtgctagatggacatgatgttcccattaagctgagtcctaataactgtttatgttcaggggataggagttatctgcttgggtcagtgagatttctttccacactggtcagtggtgtctgaagagatacaagtgctcaatgtactcaaaacaagtgaccacttatttattgtccagcaataaatgagacatctattaagtcatacaagactcagtgagtatcacagaaagagggtgggaagaatctctgagatggaggaagggtggtggtgatgttggtgatgctggttgggtgatgacttctgggaaagatatgactgctgcactctttgactcaccatagctatgattacctatgccagacgagtataacattagtcctgtacggtcaatattctatttagggaacaagagatacttgttgatcacacccctttctgagggtttatttatggtagttggtggttgatagggaaatgagacaactctacttcaggtatagatgttggcaaggtgctcatgaccctgtaaagaaaccttaatgaaattcactgggttgttaaaagaaaacaaacttgagacgtggaagtagaggagtggctagtttggaagagaaggaacattgttgggagtaggagacagaagaggatattagggctgaataggatcaaagttcattatgcacacccatgaaaaaataatgatttccatcctctgtttgtaattgatttatgttaataagaacatatctctggttctaccttgaaaaaaatgcagttatatagccagcaagctggctgcaggctggaatgctggggttctccagaaggtgcagtgtgctcaaatcagtgcccaatatatgctttttcccattactcaggcttcacaggtccaggatggagatgtggaaatggaaatggcacctcatcagcatcgccattgagccaccagccaaacttttgctttatgttccacaagcttatgctctgttggcctagaagttttgaccccagaagtgggggtgctttggtcaggagacatcccactgaagtggaagctaagactactctctagccacattggaagaaacaatacagttaggaggggtggttgacccagaccaaagggaaattggactctttccccacagtggaggtaaggaagatcatatcaaatgcaagagatctgcactgtgactaaagccaatgggaaactacaacaactcaacccaggtaggatgatacatcacccagacccttcaagagtgaaggcattggtcacctctccaagtaaaggaccaagaatgcctgatgtgcttgctgagggtggaaggactagggaatgggtgtagaagatagttctaactccagctaaggctatgaaatctgttatagaaatggggattgttagtgccaagaatgtttctgtcccaattgtgttcagactatgtttgagtagatagatgcatttattaagaaaatatctgtatttttattccttttgtgttcctttatccagtaatgtaatgactgagatgctatcagtcgttaaatgttcttaaatttatcttgtcatagttaaggcataggacaataaaagaccacattcctccagggaccttgccaattttctgaggaaaatacagtgcattttcactggtagtgagataactatatagcattggtctcaagtcagaaacatgttttgaagaagctcctcccctagagtgggtggcccttctcagtggtaaccacctacataaaaggaagtcttctgggggaaactctgctgtttgctggcctgcttcacttcctgctggtgagggtgttaatccttgctgcagctgtgcatcctcactgacatcagactccagtgtctccgggatccagtggacattgaagatcggtagctctccaggagtcttcaaagcaccaggtttggaagtgctgaggcttctggctttgtaacctgaacagctcccaggttccagccattgttggactgggctgtgtggacccatccagcacactgtaagtcattcttggaagccctctcttagatacacactctatgtgttcttttccttggagaaccttatctaaacaatctgttgatctgttgtttcccccaaacccccagcaatgctgggcacccagcacttcatcagctatcattttctctctcaatcttttccgcatagctcagtggggcctgttgtagaaaaaagataaagaacaatgctatatgacccttggtttgagagagtaagtgggttatatttcaacccaggtcctggggctctgggaggcccaacaattcattccaggtcctcccagacttcttgtttgtcatattgcctctttcctataatcatttacaacaagaaatcaaattctgcctttcactatttatcatattaatttgttgacaatctttctacttcttattcttaatggaagcatcagacttcttagacaggtcggttttgtgttttctgagaggatatggccgtaaaacttctcctttgcctcacatgactgacaaacaaatcagccagtgttagccttgagtttgtttttcagcaggtgataacaagatatggagaagtcaaagggaagaaagtctgtttcccaggccagagtggagaatggcatggagaacccaggcctggaactcatggtaattcactatggtggctgctgtgtggctcggctgctttctcagtctctagatcccctgacaggactctgcatggctgatctcatatttacctgctcttgtaggaaggcggaaatcttgaacaaagatacacacaggaggaagtgacacagggacacagcctggaggatggcttggggcattcctctctctggaggtaagggtggtctggattccagcttagttagcaaccaagaacctgggggtgggggccacgggaaaaaagtgactgagagagatcgaagctactcattcttagattgcttaactcacagacaccatcaggatcactgcatgttactacataagcatgtgtattttatagaattaactgaatgtcagcccatgacttagacaagcccatcagtgcctgctgggacaacattaagaaaagaatagcaaaggcaataacagtaaatggctaacattgattgagcactactatgatgaacaatggaccttgtacatttttgtagacacaaaatttcatccttttgttagcagtttaacagtcactaatgtaaattctatggtcagtctgcttagagccatagctgaactcggcccatgagtgtcctggttcgtttgttttgttttgtttttcttgtttgggtttggatctttgcttttctcttctttttctttcttctctttgctttttgataaaatgttactacatagttatagctggcttggtactcatttataagctagggtgccccgttggatttactggtatgctcttgcttcaaactcctgagggctgcgattaaattcttgctgttaagtacatgagtggaatttcatgctggtctagtgttacacaactgtcaactctgtaccttgaaggctgatacaggaagataagttctggtcttaatgagtgtaagaatagcctggatgctctttcacccctcccccccatcaaagttactttttcctctttaagcataatttagacatgaatgttattgatactttttgcttacctgccaaggatgattaccacttggcacactagtgtgctgatctgagacctccaccatcccacacagcaggactaatgatcctcaagggcttgaactctttatttttgtatgtgagtgcactgtcgcttcttcagacacaacagaagatgatatcagatctcattatagatgagtgtgagtcaccatgtggttcctggaattgaactcaggacctttggaagagtaatcagtgctcttatccactaagccatctttccagcccacgtttgaactctttaaattcttgttgagctttccacttcccactcaggcttattctcctctccttctgaacatgccttgcttgtcatccactgggataggtgtgggacttaagccctcagtctcctgttcctcagttattcaaatagcacctataattttccttgcaaaagaaataaacccaagggctcaggctgaaatgggcatggggcatagtcatgagagagaatagctttccttggaagactccactgcctgtcagaaacaaatgctacctccaatttcaggagagataagttctggaggaagaagctgagggtaggttagaaaacccactatgtaggttcttcatgtctgcctgtccatctacttatttatgtatctatatatcaatgtatctatgtgtttatttatgtatttatctatgtatctagtatctatgtatctatgtatttatttatatatgtatctattatttatgtacctatgtatttatgtatatatctattgatgtatatatgtatctatcatctatttatctatgtatctatctattcatctatcacctatctatctatctatctatctatctatctatctatctatctatctatctattgggacattcttattctgtcactcaggctggcctcaaaactcttctgggctcagctgggcatacagctgtgaatcatctcacctagcttggtgctttgtttctttagatttttggtattgcttctccacaacacagtaaagatcaaatactggctatcttctgtgagggctgtatcaagcaaggatgtgggtgttttgtggaggaaagtcttctcccagacaacacatctacggagactcggtagtggctatgttctggtttaggtcctttctcattgtatttggagtgagatgctttagaactagctatttccagctcctcatagctatcacctctgatttaaacgtgctggccttctctgatagactttgccctggctttctcctttttttggctttacacagtggttattagcctctggtttgtgtgtgagatgcagttgccattctcctttggatgctgtgtaaatttctctatttgctatgcaacaagataatccagctcttaggttcaaaaccagtcgtgtaaaaagaataactcatttgagctagcacagaatatctgtcagctgtgagagggctgtcctcccatatagacacttggaggtagaggcacagtgccagtgttcactcacctagcagttaaacgtctcaattcaatttctacttatagcaccgatacaagtgctcaaaccgtaccatcatgtaggtaagagcttggttctgttagcaaggtgctggaccaggcaagatacagagttcacggacccttgtgtgtgtgcttctgtgactgcttgtttagtttaaaaggttgcattgttttttctctttttcttttggatgtataatccatcatttttttttctttttcatactcagttccaacctggttttctaggattccattgttcatgggttttgcaaatatttaggtgatttctgaagtacttattgaacttcccaggaaatggtggtttgtggcgaggaggtaaaaccctaaggctttgctatctattgtctcttagactcatgcatgtcccctctcctttggagtggctttgcctaacaggtatgtatttgggcatagttttaagccagcttcaccatgtgaatcaggaaacaggtagcatatatattttttaaaagatttatttatttatttattatatgtaagtacactgtagctgtattcagacataccagaagagggcatcagctctcattaagtatggttgtgagctaccatgtggttcctgggatttgaactcaggacctttggaagagccgtcagtgctcttaacctctgagccatctctccagccccaggtagcatatttaaactagaataaccagaagagagtttactcataaagaggccattatgtgcaaataaagtataatgacaggtgtgtgaaaataccataataaaacccaatactgacctaaaaatagaattaagaaaaaacaaaaagaatggctagagaggtggctcagtggttaagtacatcactgctctttcagaggactctggatcagtactgagaggccacatccagtggcttacatctatctgtgatcttaactccataagctctggggcttcccctggcctctgcatgcacaatcctcacctccacaaatatacatgtaacaataacaaacaaagatggacatttgaaaatgttatgaagtagagctgagtcatgggaaggatggtacttgatctaaggtttgaaacagtgaacacaatctattcctagaccagaagggtatagtgcaacagaaccggtagtatagtcagatcagaatccctccctgcttagatgtgaactttatgtattgtgagctcttgtgaggtccgatgggcagaaactcactagacgagccaaggggtttggagctcagtggtatatcctcacagattgaactcccaggatcaaagcagggtagagtgaggacctggaggagcaactaaaagacctggatctcatggaaaaatctagagtcaaaagtgagagcattgctttgtgtactttgtgagtgatgttcagactgcaagagcagccacctccaggcttattagaggatcactgctgtcagctactgacattgtaaactttctgactcattacttttccactgcgcacagatggtgtcagaggccttgagatcccaaatatcctactgaattcatgggtttagataatccaagggtgatacagctttgctctttcttttacttccctgtatctgagcatgtacactctgttgaggcaagtcagggttagacttcctgcagaagataaggggagagaggtgagactgaagaaggaaggatataggggctatggttataacacgttcaagtgtaagttaagtgggataggcaccaatagaaaaggagtccaatactgtgtggaccaagaccccagaccatttagcagttggtcccaccagtgactaagcatcatacctttccaccatagtcagacaggtcacttctagctgggttcactttctttggagcttccaagagtatgggagtgggatgattttgcacacatagcttcagtgtgctaaggacacttaggttggcaaaggcagataatggggtcaggtaaggcacagcctcggatgatgatggagtgcttagattcaagagccaggctactcagagacaagctctcctcctgacaactactgtgaccttgggaaagttactcagcttcctggttttcagattgcaatagcaaccacctctaataaccagggttattagaggatcaatgttagtatttgcaactcctttgagcccaaacacatggaaaatactatacaaagcagtcttgagtagttcttgctgggcatcctctctcaggcctgtcaacctagagacccttgatgttagtgctgttttctctcctatccgccaaagtatgaagaactgctcaaagtgctagctctgtgtggtgttggggtgctgtgatagaatagcttctaagaaagacaggcagaatatgggaggcaagcaatgtctgtcctaggataaacacagaacatcatctatttctgtggtagaagacaccaatgacatagctactgtatgaggagtcagccttcctgacctgatgcacaggtgaaaagtcagagctggcctttggggaccccgttggagtactacaaacatctgcatctgattaattttctttattaactaagaacaatctttgcctggcccatcgagttcaaagaattgcacaaacaggatgaagtaatgctcacattttaattttggcttctcagcaggaggatttttcagcctttcacgaaggcgagaagtttctttgaaagacatgctggtttattcaaaaagatcctacttggtctcttgtgtttaggtgagatcatgagaattcatggaggggaaaacatgagcattttcacaactgttaactatgtcaaggctatggctgggtgaaaactaatcgtactcataagttaacctaaaggctctatgaggtacagatctaactgcctgtaggtaaaaataatttattgcctcagacccagaaggataagtgaaatccaaagataagctacagttcaaaatcacactatttgacaggtttaaattattaagaataaaaaaaaatcttttagttcacctcctttttagtgcttggatttgattcagggctcatatgtagtatttatgaacggcgcccttatgcataactcatttactgctttatatttaaaatcagtgctatacactatttttgaaagacagaaaaccttatttatgtatgctgtcaggggcatgtggagcattgattaggagtagctgggatggtgagatcacaaattatcctttggggtgaatctgaggcccagagggaagcatcatgtggcttttccttgtagtgctagtctccttacatggctttattcaagaaaaagttcaatcacttgacatctcaacattgctgcagtaaaaatcaaattaacaaagagatgtctaatttccagagtctgacagtggatgtggaccacatctaaggcagagactggggacaacagctaaaccagaatgggttgagactctcccaggagcagagaggaatggcttcattctgcatggaggctcggccttcctgacccccactcttccccttctcttcacagcatatactgcctacttcctggcagcgtgcatcctgaacttccagagggcactggccttgtttgtcatcacctgtcttgtgatcttcatcctggcttgccattttctgaaaaaattctttcctaaagaacaactaagatgcttgaagcctctggaaaacacccacctgaatctttgggcaaagcggtaagtgtgtcaatcagcttttgttgctgttcacaaagtacctaagaataatgcaaaagctatcctggctcccagtttcagaggcttagcgtacggttgcttagctccatcaatgttggctgctgatagggtagaatatcatggtgggaagtgaacaggtgaaataaactgttcacatcatggaggccaggaggcaaggatgtcagtagggtaagggtcctggcacaaggtgtcccagtaattgacctgcaccagttgggtctcaccttctatagtttcctccacctcctaacagtcctttaaattgtgaaagggtcagtggattaactcaccaatgagggctttcctttcccctccctttctctttcttgtcttttatttttctttatcatgagacaaggtctcttgtccagggtggtctcagaactctttatgtagccaaggatgtagcaaaggatgaccctggacttctgatatcctgccttcacctcttgagtgccaggattacacatgcactaccacactcagttcatggaatggtggggatttaagccaaggccttgtgcatcctagacaagagatggctgatcatcaaaaccatctcttgaataccttcttttgacagttcctgagtggcctccaggctcttacctatgcaaaggccaggttgcctcttcttgccctgtgatttagctccttcccctctagtcctccagagcccctctacctgtttttgtctttatagccccttagagcagtggctgtcaatattcctaatgctgtgacctctaaattaagttcttcatggtgtggtaacccccaaccagaaaatggtttcattgctaacctaattgcaattttgtcactgttatgtatcataattacatgatggttattataacgtaaatatctgatatgtatgttatctgatatatgactgcccgaaggcgtcttgtcgcacaggttgagaaacactcttagagtctaggcacaaacttgctcataaacataaatgaactgttttttcaattctatgtgtatgagtgttttgtctgcatgtatgcatgtgtgcctaatgcatgactggtaaccactgtgtacagaagagtgcatcagatccctttgggctcgagttacatacagatggctggtgaaccactgtgtgggtgctgggaattgatcctgagtccaccacaagcataagtattctcaggtgctcagccagttctccaatcccaaatcccaatcttaaaatcacattccttctgcctcctcttcctaaggtttgcagcacatgactgactccttatttatcttggtaagctagggattggacccagggtcttgtaacttctaggcgatgctctgctaagctatatctgcagcctctagtctatgtagtaaaggctttaagtccgtagatggtgtatttgatcctagcctttggagtggttaaaaaaggagtagcaatccacagggggaccagctcatcattttcttctgttttcagtatttggattagtcactggaagcaccttcatccttcatggatgagtctgtacatcacattttattgatatgtctgtatgagaaacgagaagttatgtggtttgtatcctcagatcagagacttatttatgtaaattgggagggggaagcagatgctagggagctaccagatgattctcaaggtccatctctgtctaacgaggaataagctcttgcattatctcagggattctctgactaggagcttctctgctgttcatcacctgagttggtgacagagtgttgtcattcctcctccagggtgtttataggactctctgttgttggcctcatcctctggctggctctcgacacagctcaaaggccagagcagctgatctcctttgcaggaatctgtatgttcatcctcatcctctttgcctgctccaaacaccacagtgcggtgagtttggggggggggggatttagcttgggcatagaaacacacagcaagggctatgtgattgtaaagtgtccgtgccaggtactcatgataaagacagagataaccaatattttctggaatcttcctctgacaggtttattcctatgcgagtttgaaagcttttagagacatttggtctgttaattgttactgtggtatatatgaatctagtcagcattaaagaaaaataaaatcaaataggaagaaaggaagaaagaaagaaaaagaaagaatggaagaaagaaaaaggaagaaagaaaggaaggcaggcaggcaggcaggaaggaaggaagaaaacagatcatgtcagagaatcatatggcattgtgcaggattgatgtttgcaaacgctatttgcatgtatgtgtctttactgtaatctaacttattttaaaaatcagtatggatatatttgcctatttacaatatcatcatactttttcttactcttcttcctgttccctgtgctatttttgtggtggaactccatggctgagagcgacttggagagtaaagggttttatttgtcttatgctttcccatcactgttcatcatcggaggaagtcagaacaggaactcaaacagggcgggatcctgaaggcaggagcggatgcagatgcaatggagtggtgctgctgactgtcttgctcaacatggcttgatcacgtgctttctcatagaacccaggactgccagcccaggagtggcatcactcacaatagactgggccctcttccatctaattaagaatgccatacagtcttgtttccagctcaatcttatggaggcatttctcaattgagattacttctccttagatgactttagtgtgtgtcaagttgacataaaactagccagcacagctacgttatctgagactgttaccaccctcactgagccccactcccagcacatggttgaattaggcaatggctgagcaaggtttgtaactcatgctggaatattttctttttggtcccaggtatgctggaggacggtgttttggggcctgggccttcagttcatctttggaattttggtcatcagaactgaacctggatttaatgcatttcaatggctgggagatcagatccaggtacagggagttgaatgtcagagtttttctttaccaggaaccccagagaaggttgattttagggaagcagagggctttggaactacaccgtaatgatggtgtggcagaatctggtcaggtaaagagagagagtaatggggttcaggtgagaatacagaatctagttgggtagagagaatagtggggttcaggtagtatataggatcttgttgggtaaagagagagagtgagttatggggttcaggtagtatacagaatgtggtcgggtaaagaaagagagtaatggggttcaggtgagaatgtaagtgtagagaagtgatttgctgagtctgtcatttcgtgaccaacttttgggacatggctcacaggtggtcacacctgagtccaatcccatctttctctgtggcccgcctgtcctaactcttgtcccttttcttcccacttcagattttcttggcttatactgtggaaggatccagttttgtttttggtgatacactggtccaaaatgtttttgcttttcaggtaaaacttgttttgtgggcaggaatgacaatgccagtgaaggacaggggaatagagatgggaacaatgtgtgtgttcacgagaccagaaagcatttaccaacttgatcctggagaggagtctactctttccccatgatccttaccattatgaaattggtttaaagtcgggtgcggggagaggctcaggaaatagtctgtgtttaatgctgatagtttgatagcctgtagtgcattctgagtttattcctaaactacactgcatccaattccctggtcattcccagagctctgtttagaagcctgcaagacctagctcatgacacactgagtacacacagtacaatctctcacatgctgcctctgttcttgttgcagtctctgccaatcattattttcttcggatgtgtgatgtctattctttactacctgggccttgtgcagtgggtgattcagaaggtgaggcatttggttttcacaaaaggaccttcagcttggatctttcagggggatgagtgagtttatacttacacgttgggggagaaagtaagtacataggatatggaaaatgagaaccaatttgaaaaggcaatctctctgaagcatcctggtatcaaatgattgcccaggcctgagataggctggaggcagaacatggtaagaagctctttcatactgggttgaatttgcttgttctagaagccccaaggcctgagctctggctaatatgtttgcaacttgttctgttactctgggccacactatttctccaggcttcagtttctttaacactaaatggaatagcagggaggggttttgttggacactattcaagactcctgctaatgttgaagatttatgtgtctggtttcttgtaggttgcctggttcctgcaaattaccatgggtaccactgctgcagagaccctggccgtggcaggaaacatctttgtggggatggtaagtaccctggagccttctgtttttctaatctctcaagaactgagagcttggcagagaacaaatttggaaagaggattttccctctcctgtccctcccaacctccttccttcctgtttttctaagacagggtctcatgtagtccaggctgacatcatactcactatgtagttgaggttgaacttgaattcttgattttcctgcttcccccgtctcaagtgctgaacatatacacatgtgtcatcacatggcttgaaaagctcatttttcttatggaagtcagataaatggagaacatggggcagtcagtctttatgaaagaatcctcagagggtcaaggagaactcgatgtctaatgcacagtccagacacactatccagcttcttatataggggaatgtcctagtctaagccttatccccctcaggagctgggaaggatggttgagctacctctggtttcttgctgtgattcaccgtgatttttctgaggtctctgaggaggcaatggcttgtcttgctcagaactgtcaggactcttcttcacacagcatctttctcagtgtatccatctgtgtggaagagcatgtgtttgtgtgcaatagacgtctttctctttgctgtgattaaataccttggaaaaaaaaggtgtattaagagaaaaaggattcattttgactcacggcttgagagtacagccaccctattgggaagagcttggtgacaggagcttaaggccactggtgcttgtgcccagcacccaggacccaagcctaggaaatgtcctaaccacttttagaatgggtctttctgctttaatctaattaaaataatctctcacaggctgacctatcaagataactcctcacaggcattcctagagtcattttgaggagattctatcaattattgataatcaacattaaccatttcagtgttaaatctgtgctattgactggtcaaatcaacattagggacaatagtttttcaaatgagtaagaagttaacaattggggtctttttctcccaaagccttgggctgtttatctgcttttgatctgttttcagagtacttttggattctcttatcatgaccttacattttgctaaaattatttataatcagttgaacttttccagctagacctaatcatctaagagcagggtccttgccttagtgctctactaagctaatccatcgttttgctgacactcattaaaggatacatgacctcatagattaagactaggtcatttcctccttgaatcttcctaattaataaaaattacagacatttcattaaaaaattatattttgtttaatgactctctctccctctctcatctctcctctcttctctgtctctctctctctgtctctctctctttcatatgtgtgtaagtagtcatgtatcatggctctcatatggaggtcagaggacaacttgtggatgccgggtttttctttccttatgggttctagatattgatatcaggtctccaggctgaactttgttgttggcttgacattattttcttattatttcatacagcattagcttagataagctattttcagttcctttaatacatgctctgtagacatctagtgtgtggtcagcaatggaactgtactctataatttactcactaagctcatggacttagacaccgaaaacaaagtaaatgaacaccagttgtctacagtattctataatatgctagaggaacacgtgaaaacaggacctcatggagatggttgggcaggtttttgtccactgactggaagggcatgtatctgatgggtccattctttgtctgggataagcactttgacttggggagtgataccctcttggtgtgtgactatttttctttgtttttagacagaggcgcctctgctcatccgtccctaccttgcagacatgaccatctctgaaatccatgcagtcatgactggaggctttgctaccatagcaggcacagtgttgggagccttcatatcctttggggtgaggcacggtcaacataattgctcatggtgcactcatgttgagccccacagtggtgctaatccccatctggcttcacagattgatgcatcatccttgatttctgcctcagtgatggctgccccttgtgcacttgccctgtccaaactggtatatccagaagtcgaagagtccaagttcaagagcaaggagggactgaagctgcctcgagggtgagctggggacagttcaggagatggtaaggtgtgctacctgaggaagcccagggtactagagacttccagcttccccaaagggaagaaggtctgtcactccatgtccccttttgctaccctgcttccagctaatcatttttagtctttgttttgtttggacttaaccttcccacctggcattagtgggatattatacaaatattctatgtccttggcatcagactttcatgcaataatatctgaatcacttcagagtaatctccactattataattacagaggattcccaacacccctcaaaatggctggctacccatttcttccattttacggtctatagggctgctcctctctgaggagctgagattaatgtagatagcatattctttctctgtgcccaataaccacagggaagagaggaatatcctggaagctgcaagcaatggagccacagatgccataagccttgttgctaatgttgcagccaacctgattgcctttctggctgtattggccttcatcaatgctaccctctcttggctgggggaaatggtggatatccatggactcagtttccaggtaaagtcttatatgtgttgggcatgttttcctgactctcagtaaactgaaagcctgaggaggagaaggaggtagaggaaggagaggcggctaagtgtctggagcagctcctggtgcctgacttctgttgtctactcttcctttcccttctttctcaggtcatctgctcctatgtcctaaggcccatggttttcatgatgggtgtacagtgggcagactgcccactggtggctgagatagtgggagtcaagttcttcataaatgaatttgtggcctaccagcaactgtctcagtacaagaacaaacgtctctctggagtagaagagtggatcaatggcgagaaacagtggatttctgtaagtgacaatccagcgaattacagagcgagaggtttgggccaggcatatctaagggaaggtacagcatgccacataaacattgtgggactgcaaatgtttctcagtgtcccagcctatgcatgagacaagcagaagcacatttgtcaggacccaagctcctgctccaggtctctgtgttagttctctcctgaaatctgacccaactttgatctatgagataattgttgcttccttacactaggacagtccaaagaacataccttctcctggatgtcctgatgaccctttatctacacattcaaacctctatgaaacaatttttctctcttagcatctctaggtcattttctctgtatctttaataagaaccctactgggcaaggagtctggtggtattaccatatcatgtcaatggttgtaagacaggggctggttgttttctgagtatcttttgtgcattctttagaatactgtaagaaagatttggtgtgccttggaacttctaacatggttctgagacccaccaggactaaatttatctacttgttttctcccctctaggtgaaagctgaaatcattacaacattttccctctgtggatttgccaatcttagttccataggaatcacactgggaggcttgagtgagttgttcaattccccaggtcctcaacatgccaggcagatccagcctttgctcactgcacagctgaggctagatagagaatctggagtgaagtggacctcgcaggccacctgtagctcagagctaatgcagtcagctcactatggcatatcctttacaaccaatgcttcatctgcctgctctcctttctgccaaggcacaaacaggttttatttttagtttcctacaaggaagaagctatgaacattatatttctatcttgctgttaaactgccaaaagttctttctgaaattaatcttcccaacagttttttcttttataagagtgatatttgcacaggaatttaaaaaagccaaaggaaaacaggagacaaagcagataagtggagtcagtgagcatcatatcttgctgggcaaaagctgagagtccagcagtacagagaagccattagtacgtgaagcagaggtgttcagggtgctgactgttagtgatggttgcaggaataccaggagaggggtggtggtcttggaggatgatctgtgtgtgggtgtgcatgtgtgcgtgcgtgtgtgtttgtgtgtgtctgtgtgtgtgtgtgtgtgtgtgtgtgtatgtggtggatctgtaggtgtgtttgtgtgtctctctgtgtgtatgtgtgtctcagaattccgagctgagcacttggaaaaacaaaattacaaagtctaagaagaaatataggaaaagagtgtgttaaaacgccacttctggcaataatatctggggtagattcactaaatttatgtccctgatagctaaggaagcaggtgaaacagtttcttttggtccttttcctctctgtaaaatactcatccacactgctgtatgtctgccaggtgttagctgtgactctggactgaggtgagatggatgctctcctgtccagtcctttggctcaaattctacatgtaattcctgaaacagtttctttttggtccttttcctctctataaaatactcatccacactgctgtatgtctgccacatgttagctgtgactctgggctgaagtgagatggatgctgtcctgtccagtcctttggctcaaattctacatgtaattccactctggacttactggtgtagacctcagctggctgacacaggcatctgtgcctatgggagcagctcagagtcctgcttgattgagatttatcttgaatgcattccagaaccactgaggtgagggtcagacatacaatccttgatccaggagaagtctgacttatgtgtcaagactaatgtatgtatgtatgcacctcttaaggaagctttagcaggcttaggtggtttgtcaaagaacactagtcatctggcctggttttttcattcttctaatggggactgatgtgtgaggaagacatcaattgctttctcttgttgtctacagcatccatgataccccagaggaagagtgacttgtgcaagattgtggtcagggccctcttcacaggtgcctgtgtttcctttatcagtgcctgcatggcaggtaggtgcctaagtattgtctctggcagagactacaggatctctctcagaatgtttatttaactaaccatctaccccacagacacctaatctacggcgttaccaactcccatccaagcaaaacagaacgttggagtgtatgtgtcaaatctgtctctttaaataactattatcttctccatgcaggaatcctctatgttcccagaggcgctgaaactgactgtgtctcattcctaaacacaaatttcaccaatagaacctatgagacatatgtgtgctgcagagagcttttccagaggtaggcaaacaccagggtttctgttccccccctagcatatcctcttatatgaagggaacttctggatgttgggagatggaggtcttgagtacagagtcttggaagctgtgtggagtgtatgagacacaacatggatgcttgtgattgatagtctggactcttttctcttagtaggttttatcttcattattagtcctactgtgtgtggcaggttccatttattggtgttgtatagcagaagggaaagaagtttggtctcttggttaagaagttcctgtgtttattgtgactgaaatgtatggagtagacaatgatgattttacagtcgtctaaaactcagattttttttccagatagaaataaagcagaccaggagaagacagattttaaattgaaaagataaacttgaattcagatagtgtgaaggttaccttgtttactatattctagaatatgaaaggaacctatcactgagcccaaggaacgagttttgggacacatagaaggaatgaggaagtagaatatttgatgtggtaaaagccaaaaaggtgcatgctggtagtagcctgcaggtgagtggggagagctctaggaagcaagactgaactgttatagaaaggccttgcatgaacacctcgaggagtccaattttgacctgcaggattctggaccccagcatggtgagctgtgctttatggaagggtgtttggtaacaaggagagcaaacacatcactgtaacagtcttagcaagagagtaagacacttaccagatacaggcaccacagaagggagagtcgataggagtgaccctcaacttcatagaagaaaggcccagggtgaagaggggaaagaatggtcttttctgacttgggtctgtgtgtccatcacaaggaggaacaagaaataggagagaaggctaaaggcatggcctcttctggttctggatatgttattttggaggtacctgagtgactggcatataaagtgagtcacaagtcaactggagtctgaggctcaggagagaggtcagatctggagcctgattaggaggcaatgtgtatgtccttgatgtgtccctgttcttaatcagatgttagctgtagaacaggttaagaaacaaagtaaaagtaagtgaattgcaaatttcatttattgttaaagcagaatttataaagtggctagattgtttgtctggtggagttctaatgtgtatattctcagtggattttctaaagacatattctaagaatggttggcatctagaagcccagagaaatattttcaggggctcaaataccatataaatccactcacaagtcagctggagtctggcttaagtagctgttcagatgcagctcttgcaggtggactaacaggctgctgtcctggagggcctgagttctatttccccatgcacactgagggcttccaaccacctacatctccagctccagagggtcccatgcttaagtcctctgcaggcacctgccctcacatgcacacacccacacctgcacatggaattagaatatgagaaaaataacagctggatttgtctttctttctgtctgtctgtctatatgtaatgataataaaaatagtggatattaacttgagagtagagtataatatgggagggattcaagagaggataaatgggaggggctggagggaggaacatgatggagagaagtgatataattctgtttcagtttgaatagaatgaaaatcaaaaattgagaaaaagagaaataactttgtctaattaatttgtagcaataaagtataaacagtatttctttctcaaaaggaaagtggccctagttatcagctttttttttttattaaattaaattctggatcatgtataaggtctaatttttttctcaactgtttggaaatgccagacatttgtaactgacctgaggttaggagctgggctctgggcagacaatggtcagggttctgttctagcgtcgactaaagcgtgagaagccaagttcgttcagttggatctcatgtcctggttatgacaacagatctatgcacagtaggtttgttctcagttatttggaaaacttgtcgattgttttgccttgtttgtgtctgacccctgtgcatctggttttatcatttcagtacttcgctgaatggcaccaacatgccttctttctcaggcccctggcaagacaacgtgtccagcctcaggaatcttgctagctgctgtgacctctataccagcactgtgtgtgcatgaggctggtgggccgctccaagacagttctcatagaacagattcatattaccaaatacattttcatgtacttcctattctctgagaaccccactaaactccacaaagtgaaatttctgagctcactatagctctgtataaaaatcagcccttacctttccagcggcatgacatgaaattccggttaccagacatgaaattcattatagaccctcttgagccaaagtatggtgggaatgtaactgaggggaaaatatgtgtgtggtgagggctaagatccaggttcaaccccgggcctggcccagagtggggagagtggggaaatcaaagtagatgcttagttttaacttgggaatggtggcaaaccccgtggtctcttacctgtaggctcacagctaaggggattacctcagattcaaggcaagcctggcccaaacatgacatgtcctcgtgtaggagtggatgtgaggggagatatttttaaagttatattggaaacgtgtgaatttaaagacacacattctttttgtattgccaaagacttataaacacaagagcttcttttattttcataaagaaataaaaatgattcctgtaataaagtgttgttttatttatttatttatttatttttttgaggcaaggtttctctgtgtagccctggctgtcctggaactcactctgtagaccaggctggtctcgaaatcagaaatctgcctgcctctgcctctcaagtgctgtgattaaaggcctgcaccaccactgcctggatataaagcattttttaaaaagtaagcatttttaaaattgtgcgtgtgagtacaggtgccagaggaatcctgagatgggagccacctggacctggaagtataggtggtcctgagacacccaatatgcatgctggggactacactcctgtctgctgcaggaacagtatacccttaaccactgaaccttcttgtaagccccaatacataaaatcctaaggaatatccataatttaccaggctcttattttgatttggtattctcattcagtgccagttacctgcagttcaggtttatctagaatcctttaaaatagttttggaccatctataagaattaccctacaaaaagctggccagatagcctgagttagaccccgggaggatttctctcaacagaaatgggtaaggggcacacatacaagggctacttaactttgtaactccagcaccctcactacagcactcacaccagggctatttaactgtctctccagcacctcactattcttggcttcagctcctcagtaaggggccaagtgtgggtgacatatgacttgaatctctgtgagcatgaggtcagattggtctacagggtgagcttcaggacagcctgggctacagagagagaccttgtctcaacaaatcagaaggaaaaacaaataaaaatgcaagagactctgctggatttatgatctggtgctggtgccatgctaaagaacccaggaacagcccagtggagggggtggcagaggcagtgccatagacagcaatgcttccacggagctacccagagcagtcacagatcacagagaggctgggtgtccaaaacatctaggaatgattgggtcatcatcaataggttagagggtaacctttctgtccaagtatgcaggcatgaatcagcaatcagaggcttgctgtgtcagaaatcaggtctgtactgccaccttttggaatctggagattggcctcaagtcttaaacctgtgtgctagcacctatacccattagtccatgttgtcaacccaagattgtttttctcatcactgtacactgtgtcatgccacctacccatgagcgtgatcattcagtcaccatacacaactactgagtttccttaaaaatccctaccttcctggtaagtgacccttcaaggtccctaccctctcaagtgaaaataactacagcttcatagaaggcttgctgtggaagatgcagtatctcctctctagcatcatcactgtgacacagagatgcatagcgagtgttggctctcatttctcctgccttcatttgattccatatctcctgtcctaagtttagcagtgctagaatgtggatgtttgtaccccacttcactcatgtattgagaccctgtccaggaagtgttagtattagaggtgagaacttagagtgtgtttaggtcatgtgggtggagctctcatgaatgggatccatgcaatgattgaagaatcagaaaacactttgtccttctgcctgttggtgagtgatgggcctgtatatggaatcgggtccttaaacaccaacctctgctgctctgatctgggatttctcagccttcagatttgtgaggaatacatttctattgtttaagtgcccttttgatttaaggtattttgtttctaatagatcaggcaaatgaaggcgaatactttttgcatatgtctaccatagacatattttactttctccaggggtacctggcaccctgccccacatatgcctaactcctctccttcctagtctcagaagggcaggattagaggatgggtccatttgggctggagtttgctgagggttacagactagaagtccttgctctggttaagatacaagtctaaagttcagaattgatggagccatatactgtcttaaataatgacggtaagccaaggagcaggggtaaccaggtcatcaaatggctccagtgggaatactagttccttggaatgacctgtcctggggatgagaggttggccaccaagggtgaagttgaggaagcatttcaagaagaagtagcaatttccaggattgcacgcagtgcaatttatccgagagatacctatggacagacacacatactgactgatagtgggacaggagtgttaatgcacctcaatcagaagcaagggtttaagtgagacaaaggtagacaacagcaaacaagaatgtgcccgtccgttctcagagaggattcttgtgtcagtcaagtaatagggtaggggctagcaacatggctcagtgtgtatcagtgctcgttacatttttttttttttttggtttttcgagacagggtttctctgtatagccctggctatcctggaactcactttgtagaccaggctggcctcgaactcagaaatccacctgcctctgcctcccgagtgctgggattaaaggcgtgcgccaccatgccttttttttgttttattatatgtaagtacactgtagctgtcctcagacactccagaagagggagtcagatctcgttatggatggttgtgagccaccatgtggttgctgggatttgaactcctgaccttcggaagagcagtcgggtgctcttacccactgagccatctcaccagccccatttttttttccattttttattaggtatttaactcatttacatttccaatgctatcccaaaagtcccccatatccacccaccccnnnnnnnnnnnnnnnnnnnnnnnnnnnnnnnnnnnnnnnnnnnnnnnnnnnnnnnnnnnnnnnnnnnnnnnnnnnnnnnnnnnnnnnnnnnnnnnnnnnnnnnnnnnnnnnnnnnnnnnnnnnnnnnnnnnnnnnnnnnnnnnnnnnnnnnnnnnnnnnnnnnnnnnnnnnnnnnnnnnnnnnnnnnnnnnnnnnnnnnnnnnnnnnnnnnnnnnnnnnnnnnnnnnnnnnnnnnnnnnnnnnnnnnnnnnnnnnnnnnnnnnnnnnnnnnnnnnnnnnnnnnnnnnnnnnnnnnnnnnnnnnnnnnnnnnnnnnnnnnnnnnnnnnnnnnnnnnnnnnnnnnnnnnnnnnnnnnnnnnnnnnnnnnnnnnnnnnnnnnnnnnnnnnnnnnnnnnnnnnnnnnnnnnnnnnnnnnnnnnnnnnnnnnnnnnnnnnnnnnnnnnnnnnnnnnnnnnnnnnnnnnnnnnnnnnnnnnnnnnnnnnnnnnnnnnnnnnnnnnnnnnnnnnnnnnnnnnnnnnnnnnnnnnnnnnnnnnnnnnnnnnnnnnnnnnnnnnnnnnnnnnnnnnnnnnnnnnnnnnnnnnnnnnnnnnnnnnnnnnnnnnnnnnnnnnnnnnnnnnnnnnnnnnnnnnnnnnnnnnnnnnnnnnnnnnnnnnnnnnnnnnnnnnnnnnnnnnnnnnnnnnnnnnnnnnnnnnnnnnnnnnnnnnnnnnnnnnnnnnnnnnnnnnnnnnnnnnnnnnnnnnnnnnnnnnnnnnnnnnnnnnnnnnnnnnnnnnnnnnnnnnnnnnnnnnnnnnnnnnnnnnnnnnnnnnnnnnnnnnnnnnnnnnnnnnnnnnnnnnnnnnnnnnnnnnnnnnnnnnnnnnnnnnnnnnnnnnnnnnnnnnnnnnnnnnnnnnnnnnnnnnnnnnnnnnnnnnnnnnnnnnnnnnnnnnnnnnnnnnnnnnnnnnnnnnnnnnnnnnnnnnnnnnnnnnnnnnnnnnnnnnnnnnnnnnnnnnnnnnnnnnnnnnnnnnnnnnnnnnnnnnnnnnnnnnnnnnnnnnnnnnnnnnnnnnnnnnnnnnnnnnnnnnnnnnnnnnnnnnnnnnnnnnnnnnnnnnnnnnnnnnnnnnnnnnnnnnnnnnnnnnnnnnnnnnnnnnnnnnnnnnnnnnnnnnnnnnnnnnnnnnnnnnnnnnnnnnnnnnnnnnnnnnnnnnnnnnnnnnnnnnnnnnnnnnnnnnnnnnnnnnnnnnnnnnnnnnnnnnnnnnnnnnnnnnnnnnnnnnnnnnnnnnnnnnnnnnnnnnnnnnnnnnnnnnnnnnnnnnnnnnnnnnnnnnnnnnnnnnnnnnnnnnnnnnnnnnnnnnnnnnnnnnnnnnnnnnnnnnnnnnnnnnnnnnnnnnnnnnnnnnnnnnnnnnnnnnnnnnnnnnnnnnnnnnnnnnnnnnnnnnnnnnnnnnnnnnnnnnnnnnnnnnnnnnnnnnnnnnnnnnnnnnnnnnnnnnnnnnnnnnnnnnnnnnnnnnnnnnnnnnnnnnnnnnnnnnnnnnnnnnnnnnnnnnnnnnnnnnnnnnnnnnnnnnnnnnnnnnnnnnnnnnnnnnnnnnnnnnnnnnnnnnnnnnnnnnnnnnnnnnnnnnnnnnnnnnnnnnnnnnnnnnnnnnnnnnnnnnnnnnnnnnnnnnnnnnnnnnnnnnnnnnnnnnnnnnnnnnnnnnnnnnnnnnnnnnnnnnnnnnnnnnnnnnnnnnnnnnnnnnnnnnnnnnnnnnnnnnnnnnnnnnnnnnnnnnnnnnnnnnnnnnnnnnnnnnnnnnnnnnnnnnnnnnnnnnnnnnnnnnnnnnnnnnnnnnnnnnnnnnnnnnnnnnnnnnnnnnnnnnnnnnnnnnnnnnnnnnnnnnnnnnnnnnnnnnnnnnnnnnnnnnnnnnnnnnnnnnnnnnnnnnnnnnnnnnnnnnnnnnnnnnnnnnnnnnnnnnnnnnnnnnnnnnnnnnnnnnnnnnnnnnnnnnnnnnnnnnnnnnnnnnnnnnnnnnnnnnnnnnnnnnnnnnnnnnnnnnnnnnnnnnnnnnnnnnnnnnnnnnnnnnnnnnnnnnnnnnnnnnnnnnnnnnnnnnnnnnnnnnnnnnnnnnnnnnnnnnnnnnnnnnnnnnnnnnnnnnnnnnnnnnnnnnnnnnnnnnnnnnnnnnnnnnnnnnnnnnnnnnnnnnnnnnnnnnnnnnnnnnnnnnnnnnnnnnnnnnnnnnnnnnnnnnnnnnnnnnnnnnnnnnnnnnnnnnnnnnnnnnnnnnnnnnnnnnnnnnnnnnnnnnnnnnnnnnnnnnnnnnnnnnnnnnnnnnnnnnnnnnnnnnnnnnnnnnnnnnnnnnnnnnnnnnnnnnnnnnnnnnnnnnnnnnnnnnnnnnnnnnnnnnnnnnnnnnnnnnnnnnnnnnnnnnnnnnnnnnnnnnnnnnnnnnnnnnnnnnnnnnnnnnnnnnnnnnnnnnnnnnnnnnnnnnnnnnnnnnnnnnnnnnnnnnnnnnnnnnnnnnnnnnnnnnnnnnnnnnnnnnnnnnnnnnnnnnnnnnnnnnnnnnnnnnnnnnnnnnnnnnnnnnnnnnnnnnnnnnnnnnnnnnnnnnnnnnnnnnnnnnnnnnnnnnnnnnnnnnnnnnnnnnnnnnnnnnnnnnnnnnnnnnnnnnnnnnnnnnnnnnnnnnnnnnnnnnnnnnnnnnnnnnnnnnnnnnnnnnnnnnnnnnnnnnnnnnnnnnnnnnnnnnnnnnnnnnnnnnnnnnnnnnnnnnnnnnnnnnnnnnnnnnnnnnnnnnnnnnnnnnnnnnnnnnnnnnnnnnnnnnnnnnnnnnnnnnnnnnnnnnnnnnnnnnnnnnnnnnnnnnnnnnnnnnnnnnnnnnnnnnnnnnnnnnnnnnnnnnnnnnnnnnnnnnnnnnnnnnnnnnnnnnnnnnnnnnnnnnnnnnnnnnnnnnnnnnnnnnnnnnnnnnnnnnnnnnnnnnnnnnnnnnnnnnnnnnnnnnnnnnnnnnnnnnnnnnnnnnnnnnnnnnnnnnnnnnnnnnnnnnnnnnnnnnnnnnnnnnnnnnnnnnnnnnnnnnnnnnnnnnnnnnnnnnnnnnnnnnnnnnnnnnnnnnnnnnnnnnnnnnnnnnnnnnnnnnnnnnnnnnnnnnnnnnnnnnnnnnnnnnnnnnnnnnnnnnnnnnnnnnnnnnnnnnnnnnnnnnnnnnnnnnnnnnnnnnnnnnnnnnnnnnnnnnnnnnnnnnnnnnnnnnnnnnnnnnnnnnnnnnnnnnnnnnnnnnnnnnnnnnnnnnnnnnnnnnnnnnnnnnnnnnnnnnnnnnnnnnnnnnnnnnnnnnnnnnnnnnnnnnnnnnnnnnnnnnnnnnnnnnnnnnnnnnnnnnnnnnnnnnnnnnnnnnnnnnnnnnnnnnnnnnnnnnnnnnnnnnnnnnnnnnnnnnnnnnnnnnnnnnnnnnnnnnnnnnnnnnnnnnnnnnnnnnnnnnnnnnnnnnnnnnnnnnnnnnnnnnnnnnnnnnnnnnnnnnnnnnnnnnnnnnnnnnnnnnnnnnnnnnnnnnnnnnnnnnnnnnnnnnnnnnnnnnnnnnnnnnnnnnnnnnnnnnnnnnnnnnnnnnnnnnnnnnnnnnnnnnnnnnnnnnnnnnnnnnnnnnnnnnnnnnnnnnnnnnnnnnnnnnnnnnnnnnnnnnnnnnnnnnnnnnnnnnnnnnnnnnnnnnnnnnnnnnnnnnnnnnnnnnnnnnnnnnnnnnnnnnnnnnnnnnnnnnnnnnnnnnnnnnnnnnnnnnnnnnnnnnnnnnnnnnnnnnnnnnnnnnnnnnnnnnnnnnnnnnnnnnnnnnnnnnnnnnnnnnnnnnnnnnnnnnnnnnnnnnnnnnnnnnnnnnnnnnnnnnnnnnnnnnnnnnnnnnnnnnnnnnnnnnnnnnnnnnnnnnnnnnnnnnnnnnnnnnnnnnnnnnnnnnnnnnnnnnnnnnnnnnnnnnnnnnnnnnnnnnnnnnnnnnnnnnnnnnnnnnnnnnnnnnnnnnnnnnnnnnnnnnnnnnnnnnnnnnnnnnnnnnnnnnnnnnnnnnnnnnnnnnnnnnnnnnnnnnnnnnnnnnnnnnnnnnnnnnnnnnnnnnnnnnnnnnnnnnnnnnnnnnnnnnnnnnnnnnnnnnnnnnnnnnnnnnnnnnnnnnnnnnnnnnnnnnnnnnnnnnnnnnnnnnnnnnnnnnnnnnnnnnnnnnnnnnnnnnnnnnnnnnnnnnnnnnnnnnnnnnnnnnnnnnnnnnnnnnnnnnnnnnnnnnnnnnnnnnnnnnnnnnnnnnnnnnnnnnnnnnnnnnnnnnnnnnnnnnnnnnnnnnnnnnnnnnnnnnnnnnnnnnnnnnnnnnnnnnnnnnnnnnnnnnnnnnnnnnnnnnnnnnnnnnnnnnnnnnnnnnnnnnnnnnnnnnnnnnnnnnnnnnnnnnnnnnnnnnnnnnnnnnnnnnnnnnnnnnnnnnnnnnnnnnnnnnnnnnnnnnnnnnnnnnnnnnnnnnnnnnnnnnnnnnnnnnnnnnnnnnnnnnnnnnnnnnnnnnnnnnnnnnnnnnnnnnnnnnnnnnnnnnnnnnnnnnnnnnnnnnnnnnnnnnnnnnnnnnnnnnnnnnnnnnnnnnnnnnnnnnnnnnnnnnnnnnnnnnnnnnnnnnnnnnnnnnnnnnnnnnnnnnnnnnnnnnnnnnnnnnnnnnnnnnnnnnnnnnnnnnnnnnnnnnnnnnnnnnnnnnnnnnnnnnnnnnnnnnnnnnnnnnnnnnnnnnnnnnnnnnnnnnnnnnnnnnnnnnnnnnnnnnnnnnnnnnnnnnnnnnnnnnnnnnnnnnnnnnnnnnnnnnnnnnnnnnnnnnnnnnnnnnnnnnnnnnnnnnnnnnnnnnnnnnnnnnnnnnnnnnnnnnnnnnnnnnnnnnnnnnnnnnnnnnncttgtattctgttgctgatgctcgcatctatggttccagatctctttcctagggtttctatctccagcgttgcctcgctttgggttttctttattgtgtctacttccccttttagttctagtatggttttgttcatttccatcacctgtttggctgtgttttcctgcttttctttaagagcctgtaactctttagcagtgctctcctgtaaatctttaagtgacttatgaaagtccttcttgatgtcctctatcatcatcatgagaaatgtttttaaatctgggtctagattttcggttgtgttggggtgcccaggactaggtggggtggggagtgctgcgttctgatgatggtgagtggtcttgatttctgttagtaggattcttacgtttgcctttcgccatctggtaatctctgaagctagctgttttagttgtcactgttaagagcttgttcttcaggtgactctgttagcctctatgagcagacctggagggtagcactctccttagtttcagtgggcagagtattctctgcaggcaagctctcttcttgcaaggcaggtacccagatatctggtgttcgaaccagactcctggcagaagttgtgttccactcactagaggtcttaggatcacgtgtggaatcctgtgtgggcccttgcgggtgtcaggcgactcagctggcaaggtagccggggctcaagtggagtggaaggggtttgtgccccagatcaagcccgggtagcctgcttccctatgtaccgcagtctcaagttccacgcgattggattggggtaggctctgtgttccactcaccagaggtcttagggtcccgtggggagtcccgtgtgggcccttgcgggtgttgggcaagactctgctggcaaggtagcccggggctcgagtctcgagtcgagcggaagggacttgtgccccagatcaggcccgggtagcctgcttccctatgtaccgcagtctcaagttccgcgcgattggattggggcaggcactgtggtccactcaccagaggtcttagggtcccgtggggagtcccgtgtgggcccttgcgggtgttgggcaaaactctgctggcaaggtagcccggggctcgagtctcgacccatttttttttaagagtaaatttttgtctctatctcaaggttggcctctgtggcagtcattgccagattagccatgactgtaagaattttccccacgtgtttggagaacgaaacaaaacaaaatacagcaaaatgtaaaacaagttaaaacaagttaagtttgcctattcatgtcagatagtctatggatgaataggtggtgttcaaaaccctcagagacctacggaagatgtcattaaaggatgttttattattttaaggatttttgggtatgagacatgtcacctccgtacatcacctccacttctacctcagagaagatgatgaacatcagagactccttatgtttgcttcaaatcgggcaggctgccaggaggcaaaattgttccttgattcaaccactgacaaaatgctgtccactatggacaaacatggacaaaaaatggacaaaatgaaggaaatatccttcattcaatgaggaattcaaatctgaatcatgttgccatggaaagctaatctttgccttgtgtttatgaagtactcagctccgtagacatgtttacctctcttgagggaacagcagctcctgacaagaagaaataggatttcagccaaattctcaggtctctatgctcattaaaaaatgcttcagctggacatggtggcacacgcctttaatcccagcactcgggaggcagaggcagaggcaggcagatttctgagttcgaagccagcttggtctacaaagtgagttccaggacagccagggctacacagagaaaccctgtctcgaaaaaaccaaaaaaaaaaaaaaaaaaaaaaaaaaacaaaacacacacacaaaaaaaccaaaccaaaccaaaccaaaaaacaaaacaaaacaaaacaaaaaaagagtagattcaataatctacctctttcccctattatttctatattattcctatctcttcctttctttctcttcaacccttttttccctccataagaaagaagtgatagagaaaagaaaaggaa

SEQ ID NO: 1367 - DNA, 2653 bp, Mus musculus
ctgtgcatcctcactgacatcagactccagtgtctccgggatccagtggacattgaagatcggtagctctccaggagtcttcaaagcaccaggtttggaagtgctgaggcttctggctttgtaacctgaacagctcccaggttccagccattgttggactgggctgtgtggacccatccagcacactcaggtgataacaagatatggagaagtcaaagggaagaaagtctgtttcccaggccagagtggagaatggcatggagaacccaggcctggaactcatggaaggcggaaatcttgaacaaagatacacacaggaggaagtgacacagggacacagcctggaggatggcttggggcattcctctctctggagcaggaggatttttcagcctttcacgaaggcgagaagtttctttgaaagacatgctggtttattcaaaaagatcctacttggtctcttgtgtttagcatatactgcctacttcctggcagcgtgcatcctgaacttccagagggcactggccttgtttgtcatcacctgtcttgtgatcttcatcctggcttgccattttctgaaaaaattctttcctaaagaacaactaagatgcttgaagcctctggaaaacacccacctgaatctttgggcaaagcgggtgtttataggactctctgttgttggcctcatcctctggctggctctcgacacagctcaaaggccagagcagctgatctcctttgcaggaatctgtatgttcatcctcatcctctttgcctgctccaaacaccacagtgcggtatgctggaggacggtgttttggggcctgggccttcagttcatctttggaattttggtcatcagaactgaacctggatttaatgcatttcaatggctgggagatcagatccagattttcttggcttatactgtggaaggatccagttttgtttttggtgatacactggtccaaaatgtttttgcttttcagtctctgccaatcattattttcttcggatgtgtgatgtctattctttactacctgggccttgtgcagtgggtgattcagaaggttgcctggttcctgcaaattaccatgggtaccactgctgcagagaccctggccgtggcaggaaacatctttgtggggatgacagaggcgcctctgctcatccgtccctaccttgcagacatgaccatctctgaaatccatgcagtcatgactggaggctttgctaccatagcaggcacagtgttgggagccttcatatcctttgggattgatgcatcatccttgatttctgcctcagtgatggctgccccttgtgcacttgccctgtccaaactggtatatccagaagtcgaagagtccaagttcaagagcaaggagggactgaagctgcctcgaggggaagagaggaatatcctggaagctgcaagcaatggagccacagatgccataagccttgttgctaatgttgcagccaacctgattgcctttctggctgtattggccttcatcaatgctaccctctcttggctgggggaaatggtggatatccatggactcagtttccaggtcatctgctcctatgtcctaaggcccatggttttcatgatgggtgtacagtgggcagactgcccactggtggctgagatagtgggagtcaagttcttcataaatgaatttgtggcctaccagcaactgtctcagtacaagaacaaacgtctctctggagtagaagagtggatcaatggcgagaaacagtggatttctgtgaaagctgaaatcattacaacattttccctctgtggatttgccaatcttagttccataggaatcacactgggaggcttgacatccatgataccccagaggaagagtgacttgtgcaagattgtggtcagggccctcttcacaggtgcctgtgtttcctttatcagtgcctgcatggcaggaatcctctatgttcccagaggcgctgaaactgactgtgtctcattcctaaacacaaatttcaccaatagaacctatgagacatatgtgtgctgcagagagcttttccagagtacttcgctgaatggcaccaacatgccttctttctcaggcccctggcaagacaacgtgtccagcctcaggaatcttgctagctgctgtgacctctataccagcactgtgtgtgcatgaggctggtgggccgctccaagacagttctcatagaacagattcatattaccaaatacattttcatgtacttcctattctctgagaaccccactaaactccacaaagtgaaatttctgagctcactatagctctgtataaaaatcagcccttacctttccagcggcatgacatgaaattccggttaccagacatgaaattcattatagaccctcttgagccaaagtatggtgggaatgtaactgaggggaaaatatgtgtgtggtgagggctaagatccaggttcaaccccgggcctggcccagagtggggagagtggggaaatcaaagtagatgcttagttttaacttgggaatggtggcaaaccccgtggtctcttacctgtaggctcacagctaaggggattacctcagattcaaggcaagcctggcccaaacatgacatgtcctcgtgtaggagtggatgtgagg

SEQ ID NO: 1368 - protein, 654 aa, Mus musculus
QDMEKSKGRKSVSQARVENGMENPGLELMEGGNLEQRYTQEEVTQGHSLEDGLGHSSLWSRRIFQPFTKARSFFERHAGLFKKILLGLLCLAYTAYFLAACILNFQRALFVITCLVIFILACHFLKKFFPKEQLRCLKPLENTHLNLWAKRVFIGLSVVGLILWLALDTAQRPEQLISFAGICMFILILFACSKHHSAVCWRTVFWGLGLQFIFGILVIRTEPGFNAFQWLGDQIQIFLAYTVEGSSFVFGDTLVQNVFAFQSLPIIIFFGCVMSILYYLGLVQWVIQKVAWFLQITMGTTAAETLAVAGNIFVGMTEAPLLIRPYLADMTISEIHAVMTGGFATIAGTVLGAFISFGIDASSLISASVMAAPCALSKLVYPEVEESKFKSKEGLKLPRGEERNIANGATDAISLVANVAANLIAFLAVLAFINATLSWLGEMVDIHGLSFQVICSYVLRPMVFMMGVQWADCPLVAEIVGVKFFINEFVAYQQLSQYKNKRLSGVEEWINGEKQWISVKAEIITTFSLCGFANLSSIGITLGGLTSMIPQRKSDLCKIVVRALFTGACVSFISACMAGILYVPRGAETDCVSFLNTNFTNRTYETYVCCRELFQSTSLNGTNMPSFSGPWQDNVSSLRNLASCCDLYTSTVCA

SEQ ID NO: 1369 - DNA, 45919 bp, Homo sapiens
taccccccaccacggcacaataactgccgcaccaggcttaagtaattaacaaacttactttcagcctgacccatattttcctgaggttaccctggaattctccaagtgccctacttacccatagagcctgaagtaaaaacgtactcaggcatccttcatcagtcgtcctccactttccacactctggcgtttcttcactggattatttgtagagattatggggagccccatgttgggcgccagatgttggggaaaccagccccacatcacccagcgggtacactgagtctagaggaaacaaaggagttagaaagagacagaatagcgtttaaaaggcgggtccaggggactggagcatcggaggcttgctcacagcccagagctctcaggctctgccccaatttatcggtttacaagctctttgttcttagggcagatgggagggggaggaagggatgaggaaaaggattaatcagtgaaggagaactcatgagtcattcgataagatgtatagcagtggcggtttctgtgaatttccttgaacaaaggcgtgtgtctaaactacttaagatcttgaacttatcgggactgaaatgggttggagcaggtttcaggaggagccaagatgtttgattatactccactgcttcaagggagtgttatctccctgagcaacctgtggaatgccactgagcagttatgctcttcgggcataaagacatgaaggcaataaggagacttttctcctcagaggccgcccatggcttcccatgtgtgtctcacacaggggagtccaactcaactggcacctcagaaactctctttctcacaggtctcgaactcttgacctcaggtgatccaccttcctaggcctcccaaagtgttgggattacaggtgtgagccactgcacccagctaaaacaggtattttaatacatcccttatacattaacttatgttaaagaaggtagaggaagtaatgagcttgatggagatataaatgaaagacataaaaagagatttgaaatagaactctgggccaggtgtggtggctcatgcctataattctagcactttgggaggctgaggtgggtggattgtctcagctcaggagtccgagtccagcctgggcaacatagtgaaaccccatctctaaaaatacaaaaaattagctgggcatggcagtgtgtgcctgtaatcccagctacttgggaggctgagacaagagaatcacttgaatccagaggcaaaggttgcagtgagccgagatcatgccattacactctagcttggccgacagagtgagactccacctcaaaaaaaaaaaagaaagaaaaaaagaaatagaacctctgaatatgaaaaatacaacatctgaaatgaaaagtacactggataggattaatagcagcttagacatcatagaagaaaaatcaaactgaaagatacagagaaaaaaagactggaagaaacagcgagaacaccatattagagattcatgaaatatcattaagtggcctggtgtacatttaatttgagtcccagaaagaagagataaaaggggaagatagaactcctagggtcaaacaatcctcccacctcagcctccaaagtagctgagaatatagatgtgcaccatgacactgggatttgacttgtttttaagttcactgattctcttcttagttaagctgagtctgccaataagcctgtcagagctattcttcatatttgttaccatgtttttttatttttagcactttcatttggtcctttcttatagttttcttctctcctgacagtcttttttttttttttttttttttttttttttttttttttttgagatggagtctcactgtgttgcccaggctggagtgcagtggcacaatcctgactcactgcaacctccacctcccaggttcaagtgattctcctgcctcagtctcttaagtagctgaggctataggtacgtgccaccatgcctggctaatttttgtgtagttttagtagaggtgagctttcaccatgttggccaggctgatctcaaactcctgacctctagtgatctgcctgcctcggcctcctaaagtattgggattgcaggcatgagccatgtcgcccagtcagtcctcatctctttatgcatgttttcctccttttccactacagcctttaacatgttaatcttaattattttaaattctccatataataagtggattattttaaaggtcttcatcctcattgtcttcacatcaaataggctgaggaggagaaggaaggggaggggttggtcttgctatctgaggagcggcagaggcagaagaaaatctgcatgtaagcagacccacacaattcaaatccgtgctgttcaagggtcaactgtagttggaagctatgatgatggttttagtgtatacttttagtagaatgatgtagttaattttgtataattaactgcatttatgagtctttaaacttaaaaatgataaggaaaactatctccttagttttaaagttgctttaacaggcagggcaaggtggcttacacctgcaatcccagcactttgggaggccaaggtgggtgttcaggagttcaagaccagccttgaggtcaggagttcaagatcagcctggccaatatggcgaaaccccaactctactaaaaatacaaaaattagctgggtgtggtggtgggtgcctgtaatcccagctactggggggctgaggcaggagaatcgcttgaacctgggaggtggaggttgcagtgagccaaggctgtgccactgcattccagcctggatgagagagcaagatgccatctcaaataaataaaaataaataaataaagttgctttaacagtttataaaaataaaaatcacctactttttcagttaaaaataaataaatcttcccacgtaacagtcataacatatggattatatctgattccggttggtcattgcattatctcttgatagtgtggtttttgtttgtttttccttttttgtcataagtattttggttgtaggccagacatcttgtgtagaacagtagagactgggacaaattgcttttatgccagaaaatgggcatatgcttttgtgttagtccattcttgcattgctatggagaaatatctgagagtgggtaatttataaagagaagaggtttaattggctcatggttccgaagcttgtacaggaagcatgatgttagtcatctgttcagcttctaaggaggcctcaggaaacttacaatcatggcagaaggcaaaggggaagcaggctcatcttacatggccagagcaggagaaagagagagagggggaggtgctgcacaccagatctcatgagaattcactcacatacagtaccaagggaagatggtgctaaaccattcatgagaactctgtcctcacgagccaatcacccccaaccatgccccacctctagctttgaggattatatatatattttttgagacagagtttcactgtgtcacccaggctggagttcagtggctcgatcttggcctactgcaacctccgcctcctgggttcaagcaattctcctgcctcagccaccatgcccagctaatgtttgtatttttagtagagacaggttttgctatgttggccagactggtctcgaactcctgacctcaagtgatcctcccgcctcagcctcccaaagtgttgggattacaggtgtgagccactgagcctggcctggggataacatttcaacatgagatttgggtggggacacagatccaaatcatactagtttttttttttttttttttttttaagacagggtcttgctctatcacccagtctggagtgcagtgatacaaacctggctcactgcagcctggaattcctgggctcaaaggattttcccacttcaacctcctgagtagctagtactacaggcatatggcaccatgcctggcaaatgttagccttttttttctttttgtagaaacagggtctcactatattgcccaggttggtctcaaactcctgccctcgagtgatactcctgcctcagtttcccaaagcactaagattacaggtttgagctaccatgctcagctaggcgtgtgctttctttagctaaatccttagtgtttggggttgagtcgatctagtgaaaagttgagctggatttgttgaattgagttggtggcttgtatgaagatttttctcaataactgcttgagcttcagctttaagtcttttctttgcacctatgccttagagaaggccctctccacacattcccccgcccgctttacagaagtaaatgcctgttactttctactcaactcttgctatcctggtgtggaaaaggagagtgccctctgttttacaggctcatcctcaatcttacacaggtgttatgtccctgggtcttaaaggtggggcattatcagcaatcgtccctccatcagcaataggaaatctctaatggccttggtccagggcagttttctgcctctctttcagaggtagaaatttttttttctgttcacttctctcagcaatgagtcttcacctgtggcccaagggtggcaaatttttttcccctctcccagtgatccaaggcagttttgcaggggagataaatgagaacaatccaggtagagctttgtgtctttcctgcagtgatagctgctcacctttcctaggcctgcaccatgaggggaactttcccaagtctcctgttttgcccatggtctttcttctttttttttttttcaacttgcattgcctctgacccaagtcagtagcaacctttattacttataaagatttttaaacatttccattgtatttacaacacaaattttaggcaacacactcctatgaatgtgatggttttaatggttaatacctatccaagtaaaaaaattatgctttaatgtggaaagaattttagcctgggcaacaaacatagtgagaccccatctctgctaaaaaaaaaaaaaaaaaaaaaaaaaaaaaaaactaaaaaattagccaggcatggtggctcacacctgtagcctcagctacttgagaggctgaggtgggaggattgcttgagcccagaagatcgaggctgcagtgagccaagattgtgcaccgtactccagcctgggcaacagagtgagaccctgtctcaaaaaaaaaaaaaaaaaaaagaacaaggtagagggatttgagaggtgtgtatttctgtattctggcttttttttttgagacagggtctcactctgtcacccaggctggcgtgcagtggcacagtttcggctcactgcaacctccacctcctgggttcaagtgattctcctgcctcagcctcccgagtagctgggattacaagcatgcaccactgcgcccagcttattttgtatttttagtagagacaaggttttgccatgttggccaggctggtctttaacccctgacctcaggtgatccacctgcctcaccctcccaaagtgctgggattacaggcgtgagccactgtgcccggcccgtctttttttggtgttgttttttaattcttttttttttttggagacagagtctcgctctgttgctcaggctggagtgcagtggcatgatctcagctcactgcaacctctgcctcccgggttcaagtgatcctcccaccccagcctcccaagtagttgggactacaggtgtgcatcaccacagctggctaattttttgaatttttagtagaggtggggtttcaccatgttggctaggctggtctcaaactcctgacctcaggtgattcacccacctcggcctctcaaagttctgggagtacaggcatgagccaccacacccggcccgtggttcttttctttttattattctcccaaaaagtgcagccattttggctgtcccaaatattgtttgtctgcattctgatttgaaaaataaagtgtcctcaaaataggagctaggatgaatgtggagctggagcacaaatcctttttttttttgaccgggtctccctctgttgccaaggttggagtgcagtggcatgatcacaactcactgcagccttgaactcctgggctcaagcgagcctcctgcctcagcctcctgagtagctgggactacaggcatgcaccgccacccccagccatgtttcccaggctggtctcaaattcctggactcaagagatccttgtgcctcggcctcccaaaatgctggggttacaggcctgagccagccctgccagagctcaactctcttgggcttctctcaaggattgtagacttctcaagtcctgctgctactggttgctctgcaatgccttcaaacttattttatatattttgtccagtctttttagttgttttcaacaggagggtgagttaaatgccagctactctattaagaccaaaattttaagtccctatactctccctagttctgcctgcttctacagtaattgaaggagatataaaagcagaaaggataaaaccatctattacttacatcgtatttatttcccagatgggttttggcaggccacctcattttccaggagtaacctctaggctttaggagagttacaacctttaggacagttgtaagtttcaacttccacagaaatgaccagagctagcctctcatcctggctctcccctaactaactgtatgactttaggcaaattcctcatcttctttgagtctatttttttttcttttgatctaaaataggattagtagctaacttgcttaccttacaggaatattacaaggatagtgaaagtatagaaaaatcttttgaaagactataaaatgctgtagaaacagaggatctcttatttatgtttaaccttgcagcccagaaatagcttagaactgggagtaagggactcaggatatagaattggcttagtcactaactaaggttttgactctgggtaaatcactttattcttcctgatctgtaatatgagaaagttcatccatcaaactatatgtgataaggcaaaaaacaaacaatggggcccaagtcagttaatcaaggggaggtacctgctaggttaaatcttttcctcttggcagttgggttatgtcaatatttgtgtttaaaaaaaaatctggatcccttgggaaagtgagaggagtactatggcctgcacttagaagatgaagatatgggtttttacatcttctataaggaaagaaaaagggaagtgggagggtgagagaagacagaggtgtgatcactggcatcatttcacctgaacagaatactaggatctgtgcctatcattatgcttggacttagccccggaagtggcaattatttaaggtaaaaactgttggggcgtggtgactggagcctgtatcccaacactttgggaggcctaggtgggaagattgcttgaggccaggagttcgaaaccagcctgggcaatatagtgagaatcctgggtctaccgaataaaaatttaaaaatttaaaaattagctggatgtggtggcacacacctatagtcctagctcctcaggaggctgaggcaggaggaccacttgagcccaggagtttcaggctgcagtaagctatgatctcaccactgaactccagcttggatgacaaagcaagaccctgtctctaaaataaatacatacatatgtacacaaataaggtaaaaataaaaaaaagatataagatatatatccttttgtaatcttatatatttttgtatacattctatcttatacatatatcttatatatatataagatttacaggtatatatgtatttaaaaatatacaaaaagatataagatacatgtataagatagaatgagcaagagacacttcacagtcatattgacatataggacaacagcttgaaaatatctgtaagcaggttcactttcaacactggtgtcttattttcctgaattaatataagatcttacaacagtgctccacaattgcaaagtcatgtaatatttttccaagttctttcttctgtattaaattacttaattttcatgataatcttatgagataggattaggcagggtgggaaagatggaagaggcccagaaaggtaaagtgagttgctctcgatccagaatacaacacacatctactctgtgagggattctgtgtacgtctgcgcacatacacatgcagaactggggaaacagaaatatgtccttactttggtgattggaatccgcatctacataccaaataatctaagccagaatctgtggtggtgatgttgttttcacgtattttacaaatatttattgattgcctaataatattgtggtgggccttgagcctagggatacagtgaagaacaagatagagaacctggccaggagcagtggctcacacccataatcccagtactttgagaggccaaggcaggaggatggcttgagcccaggagtttgagaccagactgggcaacatattgagacccctatccccacagaaaattaaaaaaagacttagccaggtgtggtggtacacgcctgtggtcccagctactccagaggctgagatgggaggatcacctgagcccagaagttagaggctgcaatgagccatgatagtgccattgcactctagtctgggtgacagagcaagaccttgtctaaggaaaaaaaaaaaaaaaagacagagagcttgtgcttgaggagatcactgtctagtaggcgatggtatgtgctctatagggttcagcaacaacatggtgcaatcagagtgcagggaggggtcctaagttttatccagagggcgtcataggaagctttctttctttctttccaggccaggataagtgttaccagctctgtaaagtctttctctccctcttttttttttttttttttttttttgagatggagtctcgctcacccaggctggagtgcagtggcatgatcatggctcactgcaacctctgcctcctgggttcaaatgattctcctgcctcagcctcctgagtagctgagattacaagcctgcaccaccatgcccggataatttttgtatttttagtagagatggagtttcgccatgttggccagggtggtctcgagcgcctgacctcaaatgatccgcctgcctctgcctcccagtgtgctgggattacaagcgtgattcaccgcgctcgacctgcaaagcctttcttgacacatccgtctttcctcactgatctgttcgttttttgatggcagagaccttgtctcactcatttttatgtcctcacacggaaaacggtggctggctaatagtggttactcaataagtatttgttgaatggattaataaaataattcctagcagtcatttggcatggaatcatgtacagtcgtgctgtttattgttttctagggcatgtctttccagcacaaaatgatggtaaattttctgggtgcagagacggctcttactgtattttacaggctacccagtgcctagtccagtggtgggtaatgcttacaggaatgtacctgttagaagttcttacagaattcttttgttttgttttgttttctgacagggtctcactctgtcgcccaggctggagtgcagtggcgcaatcacagctcactgcaacctccacctccagaggctcaagggatccttccacctccgcctgccgagtaactggaaccacagtcgtgtgccaccgcgcccagctaatttttgtatttgttgtagagatgtggtttcgccatgttatcctggctggtctcaagcgatccgcccgtctcggcctcccgaagtgctgggattacgggcgggcgccacctctgcataagtcttaggcctgcaaaacagtcttaaaaacatataatatttaacttgagaggtgcagtcctcctctacagtgagggcaggctcagcgaaggagggcccaagacataaaactaaccaatggcaggaaagcccccatgccccacccaagctgcccctcctccctcgcagctgagcttttctttcagtccttcactgaggagccagagggaatcaattccacaagctggggtaagtaaaggtgtttgggggagggcaggtgcctaatttacaaatttttaaagagatcatatttaaactaaatgcaggtagttttgtgcctagtcaggaaggccctaatttacacaatataagttggttatgtgtgtttaatgaaattatacttcaaatgcttgaagagatcacattttcaaaagcaattccatggggaagggaattttctgcaaagtaaataaatatctcagaatgaacttatattctaattgtgaatgtccatgtattaaatttgcttattctgaggcccaaatgtttgcttattttgtttaaaaactttacttgggatcattaacattcatactaattattttaaatgtaagttttgttaatttcactgatgagttctctctggggcataaaaaaccaattcttatgctacattatagtcaggaatttgaaggcctgtaaattgttatctgttcagcaatactttagggtccgggtcttcccaactgccttcctccctgtttccttcttactcagcaagctcagtggggcctccctggggctaaaaggagtagttaccctgtgactctttctttgagggtccaagtaggaacctttatagcccagatcctggggccctgggcggcccactgattcatttcaattccactgcctttcatttctcttctcctatcttactgcctcttctttagctattcacaagaggaaataggattttatttttcattatttattatataaaaattacacatccaatcttctcaattctcagttcttaaagaaatcaactaagccttcaaagacttttagttttgcgttttccatgggtaactggtcctaaaaattctccccatccccacagaacagaatgaccaatctttcaggcttggcctgaatttgtttttcagttgaggagaacaggagatggagaaagcaagtggaagacagtccattgctctgtccacagtggagactggcacagtgaacctggggctggagctcatggtaatcaccagtttagtttctctctgcagagctgtgggctgctgcatgggctcctgtagggtatttggctgctctcaatccccatcatccctggcagggctccatgactgatcccaatgctctctgtgcttgtaggaaaaagaagtagagcctgagggaagcaagaggactgacgcacaaggacacagcctgggggatggactgggcccttccacttaccagaggtactggtgttttggaatcttgttcagttaggaaaggatctagggtgggctgccccttcaggcagcttgtggtattatcacaaccgctccaccttaccatgtgtacatatatatatgtatcttacataattaattaacttaaacatgtgccataaactccataaaaaaaaaggagttcagcagtatcagtgttggttggactgaaaataaaaataataacaatggtaataatggctaacagattttgagtgtatacttactattttgcagattgctttatgttatacatttattttcattacaacaggtaggtattcattttaatccctttagaaattaatttaccatatcattaaaaaaacagtagctcttctggaatactcagatttgggaatggtggagaggaagggaaacctggggagaaaacacagaaggacttattataaggataataaagacagtaaaaaagatcttagaagtcaaaagagaagagtctcaagaatgaagaaggtacagtccacagtgctatgtgaacaggggtctaggaaggaggagtgagaaaaatctttgaatttgtttgtggatctggtcccagaagtaatgtcaaagaaaattgtttgagtaaaatagatcatatggaaagaagcaatgttccatggcctggaaaacagtgggtatttataaaagagtgcagaagtcatacactaaaagctgagaagagaggacattggatagcttctaaagggaatacggtcatgagctacataatgatgtttcagtcaatgatggaccgcattatacaatggtgtataatcatgtatatcaacggtgtatatcattacacaacggtggtcccataaaattataatactgtatttttactgtaccttttctatgtttagatatgtttagatacacaaatacttaccattgtgctatagttacctacagtattaagtacagaaacatgctgaacagatttgcagcctaagaataataggatccaccatatagcttggatgtgtcgtaagctataccatctaggtttgcataagtacactgtaagatgttagcataattatgaaattgactaatgttgaatttatcagaatgtatccctgttgttaagtaacacatgactatatatggagatgattcagagcagcttccaaacaaaaggttatttttatattttcttctctttatttttgaaagttacctcagtgacttcttaaaatttttaattgttttattcacaatttgcttctctctaaaaatttttatattatcatgttttatatatactgaattgacagtaaactctttgtaagtttttcatgcttacatgatatttcatattttacttagcagtgtggtcgttaatcatgtgagtcacactgcttgggtctatatttgaacagtggtatgctagtaaatgtttaagaattgactctccaccgggctagtggctcatgcctgtaatcccagcacttcgtgaggctgaggtgagaggatcacttgagccaaggaattcaagaccagcctgagcaacatagtgagacccgcctctacaaaaatttttaaaaattagcagggcatggtggtgcatgcctgtagtcccagctattccaggaggccgaggtgggaggatcacttgagcccaggaggttaaggctgcagtgagccatgatcgtgccactgtactccagcctaggggacagagtgagaccgtcttgaaaaaaaaaaaaagaagaaagaaccggctgtccacatgtagttttgcaatgaatgttggttaatatttttgctcaccttaatgaggagtaagaccaggggttggcaaacttttcctgtaaaagataaggtagtaaatattattggttttgtggctgatgtggtctctgttgcaattattaaactctaccattttcgtaggaaagcagccacaggtgatactaaacaaatgagcatggctgtgttttgataaaacttaatttttaaaaagaaggtgagatgaacttggcccacagaccacagcttgctaatctttagtctagatgaaataataaattaagaccttatttacagtattcgcctgtaacgtaaaaactctcaacatggctgatttcaagtaaccaaagggttacttgaacaaggagttgggaagagatgtatcattatataaaatttccaccatacacatacagcagacatgaataacttcatgagctcacatgacagaaaaatgtagcaaaataattagaaaatgatgagtttttagtatttattacctttgtctttaatgtaatttaattatacgtttatatagttttaatttttagtaatggcttgcacaattcctgaaaatgtaacaatcacttctctcaagccagcgcaggccagcttcccctgcaccactgactctagcacttaccagattttgggcaagttatttaccctctctaaacctcagttttcaccctgtaaaacaagaataatattagtacttagctgaaaggatcttggtaatttttttttgccagactgttgttggcaccttaaactgctctgatatataacatgtccagttcccttcaagtcttatcgaccttatattttctcatataaaccatgttaactagttacatagatataaaatcatgccttaaagttctaacttgcatttatttttattttttgagaaatgaggtcttacttcattacccaggctggtcttgaattgctgggcccaaacaatcctcatgtctcagcctcccaaagtgctgagattacaggtgtgagccatgtgcctgaccttaacttgcatttctttaaatttttgtaaagctacacattttcctccatttgccttactttccatatttctacgtgtgattttcttttctttttttttggaaatggagtctcactctgtcatccaggctggagtgcagtggtgtgatcactgcaacctccacctcccgggttcaagcgattctcctgtctcagcctcccgagtagctgggattacacgtgctaccacacccagctaattttttttttgtatttttagtagagatggtgtttcaccatcttggccaggctggtcttgaactcctgacctcaggtgatctgcccacctcagcctcccaaagtgctgggattataggcgtgaaccactgtggccggcctacttttctttatcaactaaagtaagttctggattttgaacctcatttccttcctcctgaccaactctaatagaacccacatagatttcttgtttccagttctccccacctcctgccaatctatcctatatagcttctaccaaaactacctaaagtatgtctgaactcccttatatcacaaacctctgtagctctccagttgctcctgaacaaagccaaactccacagcctggtattcaattctccccaaaacctcttccccacaaccaggatctgtatccaacttgactttccaacattaactcttgcaattccctttctaatgccaccctatgctctagtgaaagtcaactatcaattgttccttatatgtaatccccagtttcctgcctccatgtcatgcatgtcattacatcattgcttatgagtgtactgtcttcattttttgtctttgtgcccaaatacaacacatattttaaggctcaactcaagagcaatcatgtccatgaaactttctctgatgctgcctctcctcacctcaacctcactggccccagtactaaaaggtcccttctttctccaaacttccataacattctatctgaccctctcttataacactttaagcttttgacattttgttatagacttacatgtatattatatcccctatactggactgtaaatacattgagagcaagatcaatgtctatttcatccttttgtctcctataacactggaaacaatgctttacccatagtttatacttaaaatgccataacattcaaaattcaataaatacatgttaataagttatgtatataatctagataacagactttgtaatttcttcatgtgtacatttttcaattctgttttgtttctgtattgatttttaagtatttatttctttttcttcttgttcttttgtttgattaactctgatgatctgggatgctttgtagggagtaatctgacatgtagctttaagctgatgcttttccatactgatacccacttttctagcaagttattaaattgtgagttctttctctattctgatgttgcttcgactttattaagttaatgtgatgatttggatttatttttaaatcttttgtttcactgacacagttctgagtacttaacacgatatcattgtttacaatgtacattaaaacttgatggctcatgtatttgcattagtttttcctttaaaaaatattccttggggctgggcatggtggctcatgcctgtaatcccagcattttgggaggccaaggcaggcagatcacttgaggtcagaagtttgagaccagcctggccaacatggtgaaacctagtctctactaaaaatacaaaaatatgtgggcatggtggtgggcacctgttctcctagctactcgggaggctgaggcaggagaatttcttgaacctgggaggcggaggttgcaatgagccaagatcatgtcattgcactccagcctgggcaacagtgagactccgtctcaaaaatatatatactatatattttttttgtcaaattttattttattattattattaatttatgtttttgggactgcatgccatagtttaactggtacagttttttttgcctttttagtgtaatgtttaataaagcatagcatgcatacagaaaaataaacataagccttaatgaattttcacaaagtgaatacaaccatatgaccatcgaccagatgaagaaccaaaacattatccgtacccaagaaccattttatgtttcctttcagtcagcctccctaagggtaatcattatcctgacttttagcatcatagattaattttgcctgtgtttggactttatatgggaagtctaatttatactttaaataaaaatataccatatatatacttttgcttcttttgctttacattgtgttttggagattcttccatattattgcatatattgtactttgtacatttttaattgctgtatagtattccattgtaagaatctaccacagtttatctgctcattttactgtgggtctgaattttagtagtttctatgcttttgctatcatagtgcagctatgaacatttttgtgcatgtcttttagtaaagataaatacacctttctattgggtatatattttggagtggaattgccatgctatagggtatgtgtaggtttatgtagctttaacagatgctaaacatatttttagcaaatttcgctcccctggcagtgttatgagagcatgtcttttttcattgtctccattgtatgtgtgtagtattatcacattgtagctttggtttgtatttccctaatggctaaggaacttgtgcatcttttcagctttttctggccactgaatattctcttttgtgaagtgcctgttcaggtctttaattggcagtgtttttctttcttagtgtataaaaatagtagtacattttataaatgatgaaatacaaacaagagtacattttaagcacttgccattaaaaaaactggtatgtaaggtaatacatgtgttaattagcttgatgtagccattccacaatttatatatattttaaggcatcatgttgtataccataaacatatacaatttttgtcaattttattttaaattttttttagagatggggtctcacaatattgcccatgctaatcttgaattattgggctcaagtgatcctccctccttggcctcccaaagtgctaggattacaggtgtgagccactgcacccagccaatttttgtcaattttaaaaagaagtacaaaattaataccctgaatgatgttgctaccactgtaaatgatactttcatactttctagctatctgtcacaagtatataggcaaatcatttttatgagtttatctatctacctattcttttattcagcaaacacttattgaacatctattatgggccgggcacttgttagcgacctaaagcaataatagtatgtgctaggtactaatttaggcaccaagaatacaaagataaaaacagaaatgctcctttccctgatatgctcaaaacctaataaagacaggtaaacagaaaaatgacaatatcatgctatatggtaagtgctatatggtaagtgagttgtggtcaggaggtgatggaagaaatcttttctaggcatgcaatttgtatctactcttggactagtccagcctgcctcttactttgcaggaggcttactcaactggcatttgactgcatataattttaaactagctttatctagtacatcggtttaggtcccaacaggaaacagatggcatacttaaattaagataattataggagaatttatttacaaagagaccattacaaagatatgtatgaggtatggtgacaccataagaaaggataatgcaagaagcaaaagtcttgaagcagtgaacagttactattcgtaggcctgaaggaataagatgtaagagcacctggcaggagagtcagataaaaagacctcctcaacacactgacctgtcttttcatacactctgatcatctgtggaggtcccagtagcagaacccaacctgataagccagaggacatgggagtacattgatgtagtttacatgagttaaattcccagggcacagagtggagtggagagtggtgctggaggagcacaccaaagatatctggcacacatgggaaggccaggattgaaattaaattcattccttgatatactttgcaaatgatgttccaaagataatgatgtcctcaggtatgctggcccttttactcactactttctctattaagcatggaaaaatgaggaaggatcacttgagcccaggagtttgagaccagcctggggaacatagcaagacctcatctctacaaaaatttaaaaaagaaaattagctgggcgtggtggtgcacacctgtagtcctagctactcggaaggctgaggcaggagggtcacttgagcctgggagttcaaggttgcagtgagccatgatcatgccataccactgcactctagcctgggcaacaaagtgagaccttgtctcttaaagagaagaaaagcaaagcaaagcaaagcagagttcttgagatcctaaagaatcatcttgagttgatccagtcagatggtgataagcattgtttcctcctttctcagcttacctgtatctcatagtacacactctgctcagctaacacagggttgggcttcctgcagaaggggcaggaggggatgggggcaggaatgaaaaggaagactaggaactgggagtgtgttagatgggaggggcagccatggaactccatgggccaaagccccagggcattaggagttaatggctggtcctaaccctggctaagctgccctgcctcagcatgactgccagactgggaccttcttgctgggatcaccttctctggagctcccaagattttggaaattagagcttttggctcagatggctgcagcatgctgagcatacttaggagtggaaaagacaggcaaccctggaatctagggaagatgtggcatagaatgatggttaagagctcagatgctgaagccagagtgtatattctgtgttcgctccttacagcctgtatgactttgggaaagttatttaacttctctgtttttcagtttccatactgtaaaatgggaatgctaatagtaacagctccaggggtcttaagaggagtcaatgagttagtatttgctaagttcttagaaagagctcagcatagagaaagcactatatacatgtttgttaaatcaaacttgaatatccctacttgctgggcctcttctctcaggcctgcacatccagagcaattcttgaggttggtagcattttccttcctgtctgtcaatgcacatttggctgactgttcaaggccataggtttgtttggtttttagggagggatggccaaattgcctctaagaagaacaggccctcttgtgaatatggaagcttagcaatcctctgtcctttcagaatgggaaaggaaagtagtagacccctgacatgagcagtacccacttctatggtaggagactaccaaggatattgctagttcgggctgagtagggtattctgacctgctgcccaccagcaaggtttgatttgccctttttggcattgcaggacactacctaacttcctcctggctgaagaatattcttcattgactaagagctaattctgccttgtgttaggtaatctgaattctgagagttgaattaatagaaatgggatggagtaattcttgtatcttaacttttgggttcttattaggaggagtcggtggcctttcagcaaagcaagaagtttctgcaaaacacacgccagattgttcaagaagatcctgttgggcctgttgtgtttgggtgagatattgagaattcatgaaagtgagaaacacagttattttagaaatttgccttgtgtcaaggtgattaccaggtggaaggcatttttattcaaaactgatctaaaaagctatttgatgtatcaatcttaactacttgtaggtgcaccataatgtattgaattgcacttgtaggaacaagtgaaatctgagaataaactatttttcaaaagtgtactatttgatggatttaaaatatttcagagaatgggggcttatcctttttttagtggcttgatttggtggagtgcatgattcttacagccttgatgacagaagcctgtattataccttacttatttgctggtttactactatatcattggatataaaatattcttaaaagacagcagatctctgtttaaaacatactgtcagtggtatatggggctttaatgtcaaaataggaggcacctgggatggtgggagcaaaaattatattttgggatgagtaagagagccatgggatgaggtccacatggctgcacttcccagtggtagctttgtttacatggtttgttccagaggcaaggttaaagtgactggggtaataaagtttcaaggggagatgactgacttttgaagagtctaatggtgaacactgatcaaatctactccaagggacagagagaggatattagataaaatagaagggaatgagatttcattagggaccagtgaaaatatgcagtctttgcattaagtcagactgtccttgggaatcctcaagaagaggacagttagacatctatcctggcctcaagaagtgcagttctgtctgacagtagggctgggtggcaaggtctctggagggtttttcttgctctaagtcccaggcattcatgactggagtttcatttgcccattggaagcactgccttgctgatctttactctgcttcttctctttttagcctatgctgcctatctcctggcagcttgcatcttgaatttccagagggcactggccttgtttgtcatcacctgcttggtgatctttgtcctggttcactcgtttttgaaaaagctcctgggcaaaaaattaacaagatgtctgaagccctttgaaaactcccgcctgaggctttggacgaaatggtaagataagaatctcaatacctggcctcacagcttatcccagcccacctccttttttctcttttgatagttgctgagcaggctctcagacctgcacataggcttttcagaaccaaagcgcagagaaaaataacaataggcctctgagcacaggacctcagtccagattcttgtagccttgggtctcaacattgctggggggcaggaggagtttagtttcagagaagagttttagtctgattgtcatcagagccagtgtcagaaatgagaaaaatcatactcctcttcagtgaagtaatcagaacagagccttgcagctacattaagctatcaaattgatttggtggtcattggtgtctcccttagttccctgatactttttatgctttttttctctctagtctcctagacttcctgcacccactggtgccttttaaaattccttagagtttaaagagaaaacttacagtcgtgtatattctgaactggcgtctacagcagccacagctctaacaatggcacatgcatggcctttgatcacaggccaggagtgagagaataactttcagactctctgtaagttatttgtttttcattcactgggttgatgacatggtcttggcattccttcttcagggtgtttgcaggagtctccttggttggccttatactgtggttggctttagacacagcccaaaggccagagcagctgatcccctttgcaggaatctgcatgttcatccttatcctctttgcctgctccaaacaccacagcgcagtgagttttgggtatttgggttgggtatagcaacacatggccaagggccaagtgctaatcataaagcgtatgcatcaagtgttaattacaagggcatagaactagttcataacaacccctagaatttgcctctttgataattttgtttctaagataagtttaaaaaattctcaaaggccctagaccacttattttcaaactgtagattgtgatccattaatgaatcttgataccaattttgcgaatctaggccagtgttaaagaaagaacaaaagaaaaaaaataaggaaggagagaaaaatagaatacagtagaaaatcaacacgcagtgcagatagtactgttaaaatattgatttataaaacttttatttgtatgtatgcatgcatatatgtgtgtataagtgtcatctaacctctagacacattttttaaaaaccttatgaacatatgtggctttttgtatattactgccctgtttctccctaccattgcccctgctccctatgccatcagaccctagacttactgttaatattctaggttggttccacccagagtacatgtttaaaactccaaccaggtaatggactagcagaactcacattgaaataatattcttattgatcctaggtgtcctggaggacagtgttttcgggcctaggtcttcaatttgtctttgggatcttggtcatcagaactgatcttggatatactgtatttcagtggctgggagagcaggtccaggtatgagaaattaaatgcgagggcttttctcttttagaaccctagagaaaggagatttgagaggagcatgagaagattaggctgtatcttgttaatgatgtggtggaagatctggttgggaaaggagagagtgtactaggatacagctaagaatatgaataaagagctcatggggacatagcctgcccctgggctgtcaaagggaggccaacctcagtagcaacagtaggtcctcaggacgcatggggctggtctcgtcttcctgtgtgtccttttgggtttcattcttattctctgtctttttctttttttcccttcagattttcctgaactacactgtggccggctccagttttgtctttggggatacactggtcaaggatgtctttgcttttcaggtgatacctattttatgggcaggaatgatggtctatggaggggtagaggaataaagcagaggatgaaagtgtgtgtccaagagatcagcgcacctgtataccagtttgaccctaacaagagggtttaaccccatcagtaaaggaaatggcatctatcttcttccctgtggtcattgccatcataaaattagatgaaatgagaattgggggaaaagggtcagaaaacagcttgtggtttagtactggtgggacaatgggtttaatacattttaaatgtatccctaaactagtttgtgtaggtactgaatacctacactgtatgagatacccttggaatgctaagagcttaacttagaagcctaaaacacagagtatgcaatgtaacatctcaccacctgctaccattctcattacaggccttaccaatcatcattttctttggatgtgtggtgtccattctctactacctgggccttgtgcaatgggtagttcagaaggtgagtcgttctcttacaccagtcaggagacaggccttcatcctgtcatcagtcagctttggaaaaatgcccatagctaaggtctagagtgttagaaacaatgggaaaaggcaggccctctcaagcatgcctgatagcaaactgtcagccgaggccctaggtaggctgagggcagagcagagagaagatgagctggactgcctttgatactgagttttaatatacttgttctaaaggcaacgagtcctgagttctggtcaaggctctgtttctaagttggtttttggccctaggcttgctgctctacttctctaggcctcagtttccttatcagtaaagtggaggaggaggagttttgcgagatgttctccaagattcctgctaacattaatggtttaggtttctgtattcttctaggtcgcctggtttttacaaatcactatgggcaccactgctacagagaccctggctgtggcaggaaacatctttgtgggtatggtaagcaccttgaggacttttggtcttcttccctctgaggaactgagaatttggcacaaaacaagagtatgctttccttctgaaaagtcaaataaatgaagactgtggggcagccaatcttggatgagagataactcagcagctcaaagaagactctgctcattgcgttcaccctttgcgcctaataatacttccctggtaatacttaatctggagggatagccttcaccacttctaatgaacacttcctacgtaggaatgtagggaatgtcctcgtccaattcatatcccctttcggaggctatgaagggtgtttgatcctcattctggtttctccctgtgactccctgcagtacttggtttccagggtctctaaggaggaaatcacttatcttgctcatcgctaacgcccaggctcttccccataatacttgcttggtacattcgtctgtatggagtaggtgctccatatgtgctactgactgatcagctcaatgttggggacaatgacttgtcacattcgcagggagttagtactgaggtctttctctcccaaggctctaggctgcttctgaaatgttctcagagtacttctggatactttaccatagcactccacattttgctgaaattatccataatcagcctagtttcctatgtgagactataagcttctaagagtaaggactttgccttacctatatcaatgtccttagcatctagtgcagtgctaggcacatagttggtacttgttaaataatagataccattatcttaggtcagtgctggatatggcttacatagatggcccttcataatttcataacattttcacaaacattatttcttttgatccataagcagggggtttggatcatctatttgtatttcatttaatgagtactgttgaagcatctaatatgttctcattaagtgcactgcattccgtaagttcagtaagtgtgtggctttagacattgagaatatacaaacaaaatataccatttctcttctataacattttaacatgtcaatagatgaaacaagcatgtatagaaacaggtgagaactatgccagccaggacatgattgggtgccagaggaagtaaggcagaagctggatgggcctgacagccgggctccgtgctcactaagtgaagctgtggctcacttaacagtgctcacactggatggatgtgtatctagtgggtccagcccctggggctggggtgggcacactggcatggggagttacaccttcttggaatctgactgttttctccgtgtttgtagacagaggcacctctgctcatccgtccctaccttggggacatgacactctctgaaatccatgcggtgatgactggagggtttgccaccatttctggcactgtgctgggagccttcatagcctttggggtaggcatagtctgcttgatcactcctgggtgaactcgagttgggtttgatagaaacactgatgcctaagtctggcgcctcacaggttgatgcatcatccctgatttctgcctctgtgatggccgccccttgtgctctcgcctcatcaaagctagcgtatccggaagtggaggagtccaagttcaagagtgaggagggggtaaagctgccccgtgggtgagtccaaggaggcatatactttgggagatggtgagctgtagttaagagtggcactgtggtggcagagacttcaagtctccctgagggggaataatgtgattccatattccttcttgcctatctctggtgcttgctaatcatgctggttttcttcatttaaccctcccacctggcactagcttctgcatgccagtaccctctgtccttgccatccatgcaattacatgacaattatatctgatattgcttcagagtaatttccactaatagggtcactgaggaacccctgtcaccttctacattggccttgcaccctcctcctgcacgatagggacagtgggatttctcttctctgaggggctgagactgctgtagacaccctactcttgccctctgcccaataaccacaggaaggagaggaatgtcctggaagctgccagcaacggagccgtagatgccataggccttgctactaatgtagcagccaacctgattgcctttttggctgtgttggccttcatcaatgctgccctctcctggctgggggaattggtggacatacaggggctcactttccaggtaaaggattacatttgttgggctgtccctctgggatgtggttaggtagcccttcaaacatgcatgtccaaatcaaaaccacaatgagataccatctcacaccagttagaatggcaatcattaaaaagtcaggaaacaacaggtgctggagaggatgtggagaaataggaacacttttacactgttggtaggactgtaaactagttcaactattgtggaagtcagtgtggtgactcctcagggatctagaactagaaataccatttgacccagccatcccattactgggtatatacccaaaggactataaatcatgctgctataaagacacatgcacacgtatgtttattgcggcactattcacattagcaaagacttggaaccaatccaaatgtccaacaatgatagactggattaagaaaatgtggcatatatacaccatggaatactatgcagccataaaaaatgatgagttcacgtcctttgtagggacatggatgaaattggaaatcatcattctcagtaaactattgcaaggacaaaaaaccaaacaccacatgttctcactcataggtgggaattgaacaatgggaacacatggacacaggaaagggaacatcacactctggggactgttgtggggtggggggaggggggagggatggcattaggagatatacctaatgctaaatgacgagttgatgggtgcagcacaccagcatgccacatgtatacatatgtaactaacctgcacattgtgcacatgtaccctaagacttaaagtataataataataaaaaaaaaacaaccatgcatgtccttctgacccacagtaagccaagagagagcatgaatagaagggtggaagagattgggccaaggctccagagaaggtccttggcacctgacctttgttatattagtccttccttttcctgtgatatctctctttcactcaggtcatctgctcctatctcctaaggcccatggttttcatgatgggtgtagagtggacagactgtccaatggtggctgagatggtgggaatcaagttcttcataaatgagtttgtggcttatcagcaactgtctcaatacaagaacaaacgtctctctggaatggaggagtggattgagggagagaaacagtggatttctgtaagtgacaatccaaaaagcataaacaccgtgaggtctcagccatggttatctgagggtagacagaaagtgccaaacaggtttgttgcagacctgcagatgcctttctggggtcgcaggcctaactacaaagcaagcagaacagcctacctagcagcctcatctgcagcgcctgagctattatgggtctgcatgctattttccccctgccacccccaccactgccccaactgtgacccaacttctctctgtaatgtaattgctgggtctttacagctggggcagtccagggcagacactatcttttgatggtctaaggtccccttcttcacttataagtttaaattgctccaaattaatattctttttctttccctttgcctctctcctcctccttcgcaatccttctcattcccaggccttctcgttattcatagccttcaacaggaacagcgttgggcaatgaggcccatggtggtttccatgtcattatccctatagtaactcagggaacagttgttttctgagcatcctttcatgttccttgggaaaccatggaaaagactgggggctgtcagtactctggaacttctattgtgattataagaccgcacgcatgggactgaatttatttgcttatttatttttgttttccctaggtgagagctgaaatcattacaacattttcactctgtggatttgccaatcttagttccataggaatcacacttggaggcttgagtgagttcatccattttcccagctccccagtaagacagccagatcccagcttctgtagtgggcagtcctggtgcttcagtacaagctgggatcagatagagaagccattgtgaaatgggcccatttcttaggctgcagttaacttggacctaaggcagtcatgcccacctggctaatgcatacagccctttataatctcaacttcagttacttctttttcctttggattggaggccccaaaaactaattttattttaattttctctatgaggaagaaaatataatgatattatttcaattttgccattaaattggaatagtgcatatataaataaagatatttatttatttatttatttaattttttttgaaacagagtctcactctgttgcgcaggctggagtgcagtggtgtgatctcagctcacttaaacctccacctcctgggtttaagtgattctcatgcctcagcctcccgagctgggattacaagtgtgtgccactatgcccattattattattattattttttttgtatttttagaagagacggggtttcaccatgttggccaagctggtcttgaattcctggcctcaagtgatctgctgccttggcctcccaaaatgttgggataacaggcgtgagccaccacacctggtcttgtattttattcagtagtgaagacactttttgaaattaggctgctcactagtcatcctcatggaaacacaaagaattaaaacaaataaaagcagcaggcacataaggcagatagacagtaagagagagtggtgtaaagtgttggatttaaatatgcaagtaccaaatgttaaaggagtgggtctttgaagcagacacagatatatttagactgttggagatactgctgcatgggggtgattgttggaggaataatatgaggaaagtggaattgtccttgagtgcaggggcacaggggtgactagcagatcccaagtttggaagatccaagttagaaatggatcttaggctggatgtggtggctcatgcctgtaatcccaacactttgggccaaggcaggaagattgcttgctataggagtttgagagcagcctggggcaacatggtgagattctgtctctacgaagaatttgaaagttagctgggcatatttgcacatatgcctgtagtcctatctactcgggaggctgaggtgggaggattgcttgaactcagatcgagcctccagtaagctgtgattgcaccactgcactccggcatgggtgacatggggaggtcctgtagaaagaaaaaaagaagaaaaggaaggaaggaaggaaggaaggaaggaaggaaggaaggaatcttagaaggagtagattataataagaaatatagctcagtgtgtccctttttaaaggcaattatattctggggtagagtcatttaattcatgtacttggtagccaatttaattgaaaggtgaaataattccctttcagtttaccttttccccttctgtcaaacacctgactgtattgttctagtcttgatgcctgattactgtccgattatgagactgccatctagtagtgggatatgcattgtgtggctaagtcttaggccacacaatgagtgttgctttccttagccctctgtctcaaaatagtccatctaattctggtccaggcttaagagtgcgtatctcaagcagtgaacgccaggcatttgtacctgtctggagaaacccagagccttgctttatccagatacatcttgggtatgttcacagaaccattaaagtgagggtcagacactcaatacttgatctgaggaaagtctaagttagtgatccctcaggactaatgtatacacacacttcttagggcaacactggccagtctcaggtggatggtaataaggatgctcttcatcggctgtgttttgtttctctgcgttcttctaagtgggggcccatgggatatacctgattgccttggtggggaaaagctgaagttattttattttattgtctgcagcatcaatagtacctcaccggaagagtgacttgtccaaggttgtggtcagggccctcttcacaggggcctgtgtatcccttatcagtgcctgtatggcaggtaggtgcctcagctctgatggagatactgctgcatgagggtgatggttggaggaataatatgaggaaggtagaattgtccttgagtacaggggcaacaaagattacttccctagatcatgacaggctgtctttcagaatattgatttacccatgcattccacagatacatggcaaaggcacctaatcaagagtgtccacaattcgtgccaaaagaataaagagccttgagaagcacgtgtcagatcttccccttagtacctctgtctcctttatccaggaatcctctatgtccccaggggagctgaagctgactgtgtctccttcccaaacacaagtttcaccaatagaacctatgagacctacatgtgctgcagagggctctttcagaggtgagcaccaggaccccattcctttctctcacacacggccctcaggtctccacggtaatgctgttgaggttgcatagagtgtataagggctgtgagtattggtaatggcctagatcagtgttcttttctcttattgggtgcatcttcattattagcttagtatgctccagcgacagggtctacctgtgttagtgggctactgagaagtagagcagcaaaggaagaagaaaaatggtttccctgataagaaattactctactggctgggcatggtggctcacacccacaatcccacactttgggaggccaaagtgggaggatggtttgagcccaggagttcgagacaagcctgggcaacatagcgagaccctgtctctattttatattaattaaaaaaaagaaattacttattgtgattggaatacaggtaggttatacgtagacttagcaatggttataagtggctaaaatattataggcttcttcagacagaaatgaagaaaactgagagaggataaagttgaatttataaaatcatgatgagttcaggtagtgtaaaaatgaacttgtttaccaaaatctagaatatgaaaagaagaggatatgtcattaagctaaaagaactagttttggaacacacaaaaggaaagatttgaggaactagaatgtttggtgccttcaaatcaaaaggtgtgtgtgtattggtggtgatatatgcgtgagtgaagggagttgtgggaaaaaaggctgagagatcataagaagccttgtatgaaatactaaagaatttaggttttgacctgctgaattctgaacactggcatgatcaactatgctgtttcaaaatatcattttggtagccatttgaatggcaaggagaccaacaaacaccctgctgtaatagtcctagtgagagatggtaagaattgatactaagtggttgtgaggttggagatacactagatccagtagaatcaataggattgatcattggctagataggaggaagaggtggggtgaagaagaggaaggagtctcaagtgactatctcttttccggcataagcaagtgggtctaaggagtgccattcattcacagaagaggaggactagtttcaggaatgggagtaaaagggagagattatggcttaattcagtttttgttttttatatttattgatttattgtattgagatggggtctcactatgttgctcaggcttgtcttgaactcctggactcaagggatcctcccatcttggcttcccaaaatgctgggattataggcctgagccatcatgcccagccttaattcagtttttgatgtgttaacttggaggtagttgcaggaccaccctgtgaaggtactcaaaagccacctcaggtcgggcttcaagagagaaatcagagctggagatagatttaaaagttatgggctagacacagtggctcacacctataatcccagcactttgggaggccaaggcaggaggatcacttaagctcaggagttcaagaccagcctgggcaacatggcgaaaccccatctctactaaaacaaaacaaaacaaaacaaaactagccaggcatggtggtgtgtgcctgtagtcccagctacctggggaggctgaggtggcaggatcacttcagcccaggaattagagactgtagtgagccgtgatccgtatcactgcagtccagtctgggtgacagggtgcaaacaaacaaacaaacaaataaagatttggaagttattaagtggtctgttcactacatagctagatattcaggtgctggctgcttaaaaggttactgggccaagtgaatgaatgttgcccctcctgtgtttggaggttatcatcagagaaggcaactaacatatttttttaaaaattcttttgatgcactattaaagatgaggtatgagctggattcatcattgctctggcatcgttttgattcttctttttttttttttttgagacacaggctcactctgttgccccggctggggtgcagtggcacaatcttggcccaggctcaagcaatcctcttacctcagcctcctgagtagctgggaccacaggccaggcatgtgtcaccatgcctggttaatttttactttttgtagacatgggcgttcatcatgttgcctgattcttatgttcttgtggcattttggtggattttctaaagccacatactgaagatcattgaaagacaacgtttttgtccaattaatttatactaattaagtgtaagctgttttcaagaggaaggtggccttggaataccaccttacttttcagaatcaattcaatactaaatcattataagccatacatttgcctcagggatatctggaaatttccaaatggactatggttaggagttgcgcaaaggaacagacacacatggtttatggtttcttgctagtattatcttgggaatgaatgagaaaagaaacataattgggttctatttggtcatggctgatgggtcaatttacaggtttttgtttttgttttcagctgcttagtataacttattgatatgttttgttgctttgttcctgtctgaccccttatgtacctctctggtttttcactgcagtacttctctgaatggcaccaaccctccttctttttctggtccctgggaagataaggagttcagtgctatggcccttactaactgctgtggattctacaacaataccgtctgtgcctaaggctgcttgatctatttctataacagttttgatcttaaaagctttgtgattgcaaaggtgtttatgtactcagggtgcccacaactcactcaccaagatgtttaacagtaagtaacagtaaatgtaaaagattcattttgggccgggctcagtggctcacgcctgtaatcccagcactttgggaggccgaggcgggcggatcacaaggtcaggagatcgagaccatcctggctaacacagtgaaaccccgtctctactaaaaatacaaaaaattagccgggagtggtgtcgggcgactgtagtcccagctactcgcgaggctgaggcaggagaatggcgtgaatccgggaggcggagcttgcagcgagccaagatcgcgccactgcactccagcctgggtgacagagcgagactctgtctcaaaaaaaaaaaaaaaaaaagattcattttggttcgctgtatcccaataacgaaaaatagcttttgtttttccattatttggctgaaccaaaaaatggcattcctcatgggccctgcctgaacttttatttgaaaaaataagtattactgtccaacaatgatagactggattaagaaaatgtggcacatatacaccatggaatactatgcagccataaaaaatgatgaactcatgtcctttgcagggacatggatgaaattggaaatcatcattctcagtaaactatcgcaaggacaaaaaaccaaacaccacatgttctcactcatagatgggaattgaacaatgagaacacatggacacaggaaggggaacatcacactctggggactgttgtggggtgaggggaagggggagggatagcattaggagatatacctaatgctaaatgacgagttaatgggtgcagcacactagcatggcacatgtatacatatgtaactaacctgcatattgtgcacatgtaccctaaaacttaaagtataataataataataaaagaaaaaacttcataaaataaagtgaagcacccaccaaaaaataaaataaaataaataaataaaagaaaaaataagtattactatgtcaaaaaagtcttacaaatcatgcttctagttgccatcttaaaaattatgtgatgcagtgtgctataaatgtgatttagtatgtaatttgcctgggacgggggagaagctacatttattggcattgtggatgagctggatttatattactgatgttacctttgaaaggtatatgaatatttaatgataagatttttctggttgtcaaacatttgtaaatctgcaaacttcttaacaacattacacagtaaacaaaaaatacttcctgtatactaaggaagacttctaaggaatatccatttcttaaaggccattacttcgttgtagtattctgctttagtgctagccacatttgctccaagtttatggggaagcctttaaaacagtaattttcagtgggaagggggccaattttgcttttcagaggacatctgacagtgtgtctccagacattattggtgattaaagtgggaggatgctactgacatctagtgagtagaggccaatattgctactaaaattcctataaccaaaggtcagctctcccacaacgaagaattacctggtcccaaacgtcaattgtgctgagactcagaaactctgattcaaaatattttagatatttattatatttaatattatttattatattaatattatagccctaaggaagggtttcaaaaggatacaggagttcctcaaaaagttaaacacagaattaccatagagccccacaattccactcctacatacacattcaaaagaatcaaaactaagttctcaaacaagtacatgtacatgcatgttcacagtagcactattcaaaatagccaaaaattggaaacagtctaaatgtccatcaatggataaattgtgttacatacacacaatggaattttattcacccattaaaaaaagaagtactgatttatgctatgtagaggcaccccgaaaacatgctaaacgaaagaagctagacacaaaagtcttattattgcatgattccatttagatgaaatattcagaatatataaatccatagagacagaagggagatggtggttgccagggcctggggaaggagggattagagagtgactccttaacgagtttggggttttcctttggggtgatgggaatgttttttttttttttttttttttttgagacggagtctcgctctgtcgcccaggctggagtgcagtggcgggatctcggctcactgcaagctccgcctcccgggttcacgccattctcctgcctcagcctcccaagtagctgggactacaggcgcccgccactacgcccggctaattttttgtatttttagtagagacggggtttcgccgttttagccgggatggtctcgatctcctgacctcgtgatccgcccgcctcggcctcccaaagtgctgggattacaggcgtgagccaccgcgcccggccgggaatgttttggaactagatagaggtggtggttgtgcaacattgtgaatattatgtcactgaattgttcactttaaaatggctgtttatgttatgtgaatttcacctcaataaaaaaaatttttagaaggattcaggtacttgtatcttcccttagctaatctacgtccttcaatttcccagttctctcagctcagaaccacttggtcgtcttctcagtctcgattcctatcttctctcccgttttccaaacttgacagaaaaaggaagcttcaataaattgtttcttgaactacagatgaattttactctatgcctggtttatttctgagaggcagcagaatgcaatggttagtggtattggacatgacgccagattacttgaattctgattcaagctctgccagttatcactaaggtgattttggacaagttccttaacttctctgtgccttggcatcctcatctataaaataaagatagtgagacccaccttataggtaaagacagtgacactgctgtaaggggattatctgttttctgttgctcataacggaatacgtgaaactgggtaatttataaagaaaaggagtttatgtcttaggaggctgagaagtccaaggtcaagaggccacacccggtgagagcttcttgccagtggggactctgcggagtgcaggggcagtgtaaggcatcgcatggtgagggggctcagtgtgctatctcaggtctcctcttataaagccaccagtccctctccgtgataacccattaactcatgaatggattggtccattccggacggcagagccctcatgacccaatcacctcttcaagaccccattctcaatattgccacactggggaacaggtttcaacatgagtttccgaggaggcattcaaatcacagcagggaacaaaacagtgactgctcgctccaagtctaatgtaaggttagctattactattagctgttactaatagcattactatacttactataataccatagttaatagtattatagattatagtagtaataataccattactatcatttaggaacctgagttcatggctatcgatttgttgagtaatgtatgaaattcagttcacacaaggaagcatgagagaaggggactctatctccgtccagggcgggggccaactttttaattcggtttttaaattctcaggttcctacttaaagtaaacctggcctaaactctccctcttagagggcttcgctgtaaatgcgggaagcatgccaatctcaacaccagtgtctgcagaacactgtcaaatgcaggagggaacaggaaaaacaggaactcactgtgtcctcgataaacgcgacggggcgagaggcgctcccaggcgagggcggaagtgatgtgagagggtgtagaccgccctggttgggtggaagggccagtcaatcctgggaggcccaaaacggggaccaatcgctcttgggctccgccctggaggcggggaaaacacgcccaccacgcgttgtgggcggtgccacggcgcacgcgcattcctcccacagctagtctatccgggtcctgatccgggactctgagatgaagagctgttggagcagaagagtcctgagagaaaaagacggaaaatcgtggaaaggcgctgtggaaaggagtagtgtggaaaggagaccgcggggatgaggagaggagagaggcaggctgcatcaccgaatgggcagcatgtcttaaagtacactgtttgtcttaaagtacaccgtaaagcctctcttgtgcctgttgtttagagcctgccctttttgcttaatgtgtatggacatctttctaggccagtacttatagagctacctcattcattttatttatttatttgtttgtttgagacagggtctggctctgttgcctaggctggagtgcagtagcacgatctgggctcactgcagcctccacatcccaggttcaagcaatccccctgccttagcctccacagttgctgggaccacaggcatgtgctaatttttttatgttttgtagagacagggtctcgctatgaacgtttgtgtctcctgaagttcatatgttgaaattctactcccccaggaggctgaacaagagggtaaagctcttataggagggattaggttattagggtgaaaccctcatgagtggaattagtgctcttattcaaaaggcctgagagaggtcccttgtcccttctgccatgtgaggttacagtgagatgatggctgtgagatgatgatgaggaactggccctcatcaaacaccagatcttctagtgccttgatcttggacttcctatttccacaactgtgagaaatgaatttcttttgtttaaaagacgcctagtcaaaggtattttatcacagtagcctgcacagactaagacaaatagtttctccatatctctaccataaatttcttatatttcttttcagtggcacctggctccatgtcctgtgtatgtctgactcccagaggccagaggtaggctcagaagggtggggttaggggatgggttaggtccagctggtagttgatgagggtggcctgagggatccagacaggaagctccatgccatgtttctggtataaggccaaagatcagaactgatggagccaaatctgttctcaggtaatggaagtgaggtaaatccaggaacggggggaactaggtaatcaaatcatgttgtttttgtttttgtttttgagatggggactcactctgttacccaggctggagtgcagtggtgccatctcagctcactgtaacctccaccttccaggctcaagtggtcctcccacctcagcctcctgagtagctgggaccacaggtgcatgccaccatgcctggctaatttttgtatttttggtagagacggaatttcgccatgttgcccaggctggtcttgaactcctgagctcaagcgatccatctgccttggccttccaaggccaccgcgtccggccatgtcatcaaatagtttcaacacaattgccagacactcatgataaatatctgtcatcaacaggaaagcatagttcaggaaattgattcaaaattacctaaataaaatatgttaccacttatattttcattagactgattaactttgatcagtttctgtttttaaaaactcagctcttgcttccagacaagcaaatggtgtatttctttcaagccccaaatttactttgtcactgtctcaaggttcatgcctctcacattcatcagtagatttcccttgactataaaaatcctttccataaattcgaagcaggaatcaaaacataatattgaagcagtttaacaaatatagagtgggaactttttttgctgaaatcatatttccacttgtcaagagctgttgttccatgaagggaggtaaacattacgactgtgacattgagtgcctcattaagaaaaatgggaggagagagccctgttttccatggcgacaagactcagatttgaattattcattaaatgaagaatatttctttatgattaaccaaactcagaggacagtgtcacaaatttcccacagaaaagatattcttcagacacttgacagttgagggctcctgtattcatggttttggaagcaaatgtatgactctgtgaatgggcaaactgtctttgaactatgtgactataatttatagaacaaaaaccagtatcaatttatttccttggtagatttcagagacaagctaaatatttaaaagaatgttttaggatggctagagaatggaagacattatcactagtcatatgtttataaaagcaaaacactccattgcataactctttgctgcctagatggtggtcgccattcttgtggactaactgaaagccatttgctgcctggctgccccatgctactgcagaccacagctcacggcactgttgagctgcttagatttggctgactgtgtcagcgtgtgcgactgagcacagtggcacttaacaaaggcttagaaggggtggggaacatgctcctaccagccatatcgtgtaagaatcacacacaaaaaattcactcaattactattcataataatagctaacatttactgagtgcctactaactgccaggcgttggatattacttgaccaaattctcacaaaaactctatgaggtatctcacagtcataaagccacagccacagcccctggtgctaacatgcccccatacacccccatacactgagtactgactcaggaggaaagactgaagcatattggccaaaatgggctgcagaggctctttcttcctgagaagctggctggaggagtgggtactaccacccagaagtgtgagagagttcatgtctagggtagggtaaaccttgaccactgagagacaggagacaaaaagaagccagcattgttcacccttcctcccgtgagaggcagtggcttcatatgtactccgtggagatgccctggaaggccaggcaaacatctctgttcgcagtgaagctatggccatcttggtagcacatctctttgtttttacatctcccctacctcacttcttttttctcgtcatactttcttccctgcaatttcaccaatcaataaagcatccatcacaaaaatgtgcatatttttgctctaagcttttcttgagactgtaggctcaaaaatgctagtaccaggagtagtctttaaaagcagacctttaaaagtgtgattttagagactagcccacctatctaaaggcaatcagaactgtttccccagtggtaaacaggatagtataaccctgccatgcaggggcatgcatgacaattactaaggctttcacctccagttgactgggatgaggtgcagatagaagataaggaattaggatattatgtggctgctgtatttgatcagtatgggagcaataataacggcacagagtggagaatagactggctgctcttgagagcattggaagtcttggaaaaagaaaatgatagttcaaagcagcatattgccaactaagtaacaatatgaaagccagaggagttctgtggcagccataaaggagactcatctcttgcagcagtaggttagacactgttgaaaacaatgagaacacttggacacagggtggggaacatcacacaccggggcctgtagtggggttgggggaggggggagggatagcattaggagatatacctaatgtaaatgatgagttaatgggttcagcacaccaacatggcacatgtaagcatatgtaacaaacctgcacattgtgcacatgtaccctagaacttaaagtataattttaaaaaatttaaaaaaattaggttcagggctgggtgcagtggctcacacctgtaatcccagcactttgggaggtcgaggtgggtggatcacctgaggtcaggagtttaagagcaacctggccaacatggcaaaaccctgtctctactaaaaatacaaaactagctgaacatgatggtgcacacctgtaatcccagctgttggggaggctgaggcaggagaatcacctgaaccgggagacagagattgcagtgagccaagattgtgccattgcaccccagcctgggctacaggagggaaactctgactcaaaaaaaaaaacaataaataaaaagaaaagaaaagaaattaggttcaggatccagaatggcaaagctgctaaaggtattgaatgcatagcttcaacagctttcccatgtggaggtattttccagaaaagaaaaatgtgaggcgttaagacctgaataagaaatatgtgagtggcagagtgaccagtgaacccaaggcatcagcatcacctgctagacatgcagagtctcaggcctcgccccagacccactgaatcagaatatgcatgttaacaagattccctggccgggcaccgtggctcacgcctgtaatctcagcactttgggaggcagaggcaggaggattgcttgagcctacaagttcagggccagcctgggcaacatagtggaccccgtctgtacaaaaaaattaaaaaaaaaaatagccgggtgtggtcccagctgcttgggaggctgaggcaggaggatcgcttgaagccgggaggttggggctgcagtgagccatgatcatgccactgcactccagcctgggtgacagagcaagacgctatctcaaaaataaataaataaataaataaataaaatatgtgagtggatgagcctcaaaatctggagctcctaattgtccctaaatcttcctggccagcagaagcagtcccttttctttcttatttatttatttataatgctgtcagcaaaacccttttctcttgactaaggaaaacagcctccccttgcccatccaaaataggtcattgcagaataactttcgttcttcccaagataagcctccattctctgccttttttgcctccagtctggtaatctgtgccagagctcagcacagcctgagcagggaagtacaggtcctgctccagaaggagttagcctccattccaaaggaactgtaggacctggagaatatgtaagaactgaggactaaactctaatttttttatctgcccaaattcctacctaaggggtctagggagtcatgtcctacaaaccataaattctcatcagatgggttttgtttgaccctatatatcgtgacttacttttcaatcactctggcataacattgagacaaggaagaaatatttaaccccaaaatatatttccttgctataccttgaaattgccctacaaagtctcttgtgggaaaaatacatatcctgtagagaatccccttccccctttgttttctttcctttctttccagatccaggagataatcaactaagagccagacacccttttaggtctgataagaaacattttataacctgctctctctctgaagtctgctatctgcacaataaaacttggtctctccataatcctctttcttaacctgaacattcctttccattaatcccaggtcttcagataaactcaaccaattgtcaaccagaaaatgtttaaatctacctataccctgaagcccccggtttgagttgtcccaccattctgaaccaaaccaatgtattttattttattttctttctttcttttttttttttttttgagatggagttttgctctgtcacccaggctggagtgcagtggcgtgatcacagctcactgcagcctcagcctcctgggttcaagcgattctcctgcctcagcctcccaagtagctgggattacaggtgcacgccaccaagcctggctaatttttgtatatttagtagagctggggttttgccatgttggtcaggctggtctcaaactcctgacctcaggtgttctgcccgcctcagcctcccatagtgttgggattacaggcatgagccaccatgcccagcccaatatatttcttaaatgtatttgattgatgtatcatgcccccctaaaaatatataaaaccaagctgtaccccaaccaccttgggtacgtgttcttaggacctcctgagggctgtgtcacaggccatgatcactcatatttggctcagaataaacctcttaaaatattttacagagtttgactctttgtcaacagaatcagggtaatgtaggtgggagtagatcttgaaaatgtaagactggggagagagagagagtgagtgcataaaataaggttttataagagagaattcattacatgagggcatacattcatgagtggttatccagtgttttggcaagagcacttgaggtcactataaatagtttgttgtgctgtttccttgaagcttggacacaccagaaataatcttggcattgtactggagaagggatcaaaagtcataggaaaatgagaacgttagaatatatttactatgtattaagacctgctaacccgccacctgtctatatactccaagagcccagggaacttccttatactaaggaataagaaatacattggtgaaaggagccctgtcaaggccaagagtgggggatactgccatggaacacggatctctagtatcaaaagggttgatggaattccagaataccagaagccaaataacactcaactaacagagcaaaggtaaatacaattaccataatgggcagcaatgccagtacgacaatcaaggtgccttgacccataaatatttttggcaacaattagtagatttgagtattcctagggttgagacagatggacagccatgtaggatattacttaatttataaaataaatgcatgaattggtaagcagaaggctgacatcagccatcacaatggaacattggtttccctcagctagtttccaagtctaagtcagtttagaaacccatagcccattgattgaaggggaggctgagtccacttgagaaggaaactccaaaactaccataagtatatacatcagtatttttagaatccctctctaaaaggacaagtgacatttttcaaagacaaccataagtatatacatcagtatttttagaatccctctctaaaaggacaagtgacatttttcaaagacaactacactgggtaaagaagaatacctagatgttctgagagctggtattggggacctgaaatgttatcatgccctgtagttagattggtggtttcctaagtccaggtgatgaatagaccccctggctcaagattatatcacaatgtatccagaggttttgcgaactggccttaagtttttgtccctggtttctgaaagtataattgagacagatacacttagaatctgggaaaactgtcactttggttttctgacctgtgaaataaacttctttatggtaggaaaggccaaatagaagcccccaagccacctcctgcctctggttaagatactaaatcagaagtattaccatatcccaagaggaattgcagagattagcaccaacatcaaagactcaaagtgggctcatggctgtaatcctagcactttgggaggccaaggtgggaggactgcttgatcccaggggttcaagaccaacttggacaacataaggagacctcatctctacaaaaattaaaaaattaatcaggagtgatggcacgcacctgtggtcccagctactcgggaggctgaggtggaaggatcacttgagcccaggaggttgaggctgcagtaagctatgattatgccactgaaccccagcctggacaacagaatgagaccctgtcaaaaaaaaaaaaagacgtaaaagtgtccagagttcgtcttccagtcacattcccattcagttagatagacagtgcagcggaagtgtgctgggcacagattcccattcaattcaattattttcaaaagcacagataaataatggaggatggtaacagactaccataaacttaactgagtcattgcctcagttgcagttcctataatatctttattagagcaaatcaacacaccttctggtatttgatacgtggctgttgatttgataaatgctttattttcaatcatgggttggctaacttttcctataaaaggcaagacagtaaatattttaggctttgcatgccatctgatctctgttgcacctgctccatttagcttgattttgtgtcaaagcagcaaaatacaacatgtaaatgaatgagcatggctgtgttccaataaaattttatttacagaaacagttggagtgtcatatttggcctggaggttgtagtttgccagtccctgttagagagccccatcaactgggagaggcaaaagcattacttgacaagaagagcagtacacttgactgtcttgcctctggcctatgttaactctcctgatctctgtcaaagtatagtcaatgggaattttgaccgtcttggtagctcacagcacagtatggtagtttcatcattctgattacattatgctaattgggtctgagaagcaggatgcatcaagcactttacatgcttttgacacatttgcttctgagattgtggttatgttttcttctctgctttttttttttttgagacataatctcgctctgttgcccaggctggagtgcagtggtgcattctcagctcactgcaacctccacctcctgagttaaacgattctcctgcctca

SEQ ID NO: 1370 - DNA, 2324 bp, Homo sapiens
gtccttcactgaggagccagagggaatcaattccacaagctgggttgaggagaacaggagatggagaaagcaagtggaagacagtccattgctctgtccacagtggagactggcacagtgaacctggggctggagctcatggaaaaagaagtagagcctgagggaagcaagaggactgacgcacaaggacacagcctgggggatggactgggcccttccacttaccagaggaggagtcggtggcctttcagcaaagcaagaagtttctgcaaaacacacgccagattgttcaagaagatcctgttgggcctgttgtgtttggcctatgctgcctatctcctggcagcttgcatcttgaatttccagagggcactggccttgtttgtcatcacctgcttggtgatctttgtcctggttcactcgtttttgaaaaagctcctgggcaaaaaattaacaagatgtctgaagccctttgaaaactcccgcctgaggctttggacgaaatgggtgtttgcaggagtctccttggttggccttatactgtggttggctttagacacagcccaaaggccagagcagctgatcccctttgcaggaatctgcatgttcatccttatcctctttgcctgctccaaacaccacagcgcagtgtcctggaggacagtgttttcgggcctaggtcttcaatttgtctttgggatcttggtcatcagaactgatcttggatatactgtatttcagtggctgggagagcaggtccagattttcctgaactacactgtggccggctccagttttgtctttggggatacactggtcaaggatgtctttgcttttcaggccttaccaatcatcattttctttggatgtgtggtgtccattctctactacctgggccttgtgcaatgggtagttcagaaggtcgcctggtttttacaaatcactatgggcaccactgctacagagaccctggctgtggcaggaaacatctttgtgggtatgacagaggcacctctgctcatccgtccctaccttggggacatgacactctctgaaatccatgcggtgatgactggagggtttgccaccatttctggcactgtgctgggagccttcatagcctttggggttgatgcatcatccctgatttctgcctctgtgatggccgccccttgtgctctcgcctcatcaaagctagcgtatccggaagtggaggagtccaagttcaagagtgaggagggggtaaagctgccccgtgggaaggagaggaatgtcctggaagctgccagcaacggagccgtagatgccataggccttgctactaatgtagcagccaacctgattgcctttttggctgtgttggccttcatcaatgctgccctctcctggctgggggaattggtggacatacaggggctcactttccaggtcatctgctcctatctcctaaggcccatggttttcatgatgggtgtagagtggacagactgtccaatggtggctgagatggtgggaatcaagttcttcataaatgagtttgtggcttatcagcaactgtctcaatacaagaacaaacgtctctctggaatggaggagtggattgagggagagaaacagtggatttctgtgagagctgaaatcattacaacattttcactctgtggatttgccaatcttagttccataggaatcacacttggaggcttgacatcaatagtacctcaccggaagagtgacttgtccaaggttgtggtcagggccctcttcacaggggcctgtgtatcccttatcagtgcctgtatggcaggaatcctctatgtccccaggggagctgaagctgactgtgtctccttcccaaacacaagtttcaccaatagaacctatgagacctacatgtgctgcagagggctctttcagagtacttctctgaatggcaccaaccctccttctttttctggtccctgggaagataaggagttcagtgctatggcccttactaactgctgtggattctacaacaataccgtctgtgcctaaggctgcttgatctatttctataacagttttgatcttaaaagctttgtgattgcaaaggtgtttatgtactcagggtgcccacaactcactcaccaagatgtttaacagtaagtaacagtaaatgtaaaagattcattttggccaccgcgcccggccgggaatgttttggaactagatagaggtggtggttgtgcaacattgtgaatattatgtcactgaattgttcactttaaaatggctgtttatgttatgtgaatttcacctcaataaaaaaaatttttagaagg

SEQ ID NO: 1371 - protein, 652 aa, Homo sapiens
MEKASGRQSIALSTVETGTVNLGLELMEKEVEPEGSKRTDAQGHSLGDGLGPSTYQRRSRWPFSKARSFCKTHARLFKKILLGLLCLAYAAYLLAACILNFQRALFVITCLVIFVLVHSFLKKLLGKKLTRCLKPFENSRLRLWTKWVFAGVSLVGLILWLALDTAQRPEQLIPFAGICMFILILFACSKHHSAVSWRTVFSGLGLQFVFGILVIRTDLGYTVFQWLGEQVQIFLNYTVAGSSFVFGDTLVKDVFAFQALPIIIFFGCVVSILYYLGLVQWVVQKVAWFLQITMGTTATETLAVAGNIFVGMTEAPLLIRPYLGDMTLSEIHAVMTGGFATISGTVLGAFIAFGVDASSLISASVMAAPCASSKLAYPEVEESKFKSEEGVKLPRGKERNVLEANGAVDAIGLATNVAANLIAFLAVLAFINAALSWLGELVDIQGLTFQVICSYLLRPMVFMMGVEWTDCPMVAEMVGIKFFINEFVAYQQLSQYKNKRLSGMEEWIEGEKQWISVRAEIITTFSLCGFANLSSIGITLGGLTSIVPHRKSDLSKVVVRALFTGACVSLISACMAGILYVPRGAEADCVSFPNTSFTNRTYETYMCCRGLFQSTSLNGTNPPSFSGPWEDKEFSAMALTNCCGFYNNTVCA

SEQ ID NO: 1372 - DNA, 2459 bp, Homo sapiens
gtccttcactgaggagccagagggaatcaattccacaagctgggttgaggagaacaggagatggagaaagcaagtggaagacagtccattgctctgtccacagtggagactggcacagtgaacctggggctggagctcatggaaaaagaagtagagcctgagggaagcaagaggactgacgcacaaggacacagcctgggggatggactgggcccttccacttaccagaggaggagtcggtggcctttcagcaaagcaagaagtttctgcaaaacacacgccagattgttcaagaagatcctgttgggcctgttgtgtttggcctatgctgcctatctcctggcagcttgcatcttgaatttccagagggcactggccttgtttgtcatcacctgcttggtgatctttgtcctggttcactcgtttttgaaaaagctcctgggcaaaaaattaacaagatgtctgaagccctttgaaaactcccgcctgaggctttggacgaaatgggtgtttgcaggagtctccttggttggccttatactgtggttggctttagacacagcccaaaggccagagcagctgatcccctttgcaggaatctgcatgttcatccttatcctctttgcctgctccaaacaccacagcgcagtgtcctggaggacagtgttttcgggcctaggtcttcaatttgtctttgggatcttggtcatcagaactgatcttggatatactgtatttcagtggctgggagagcaggtccagattttcctgaactacactgtggccggctccagttttgtctttggggatacactggtcaaggatgtctttgcttttcaggccttaccaatcatcattttctttggatgtgtggtgtccattctctactacctgggccttgtgcaatgggtagttcagaaggtcgcctggtttttacaaatcactatgggcaccactgctacagagaccctggctgtggcaggaaacatctttgtgggtatgacagaggcacctctgctcatccgtccctaccttggggacatgacactctctgaaatccatgcggtgatgactggagggtttgccaccatttctggcactgtgctgggagccttcatagcctttggggttgatgcatcatccctgatttctgcctctgtgatggccgccccttgtgctctcgcctcatcaaagctagcgtatccggaagtggaggagtccaagttcaagagtgaggagggggtaaagctgccccgtgggaaggagaggaatgtcctggaagctgccagcaacggagccgtagatgccataggccttgctactaatgtagcagccaacctgattgcctttttggctgtgttggccttcatcaatgctgccctctcctggctgggggaattggtggacatacaggggctcactttccaggtcatctgctcctatctcctaaggcccatggttttcatgatgggtgtagagtggacagactgtccaatggtggctgagatggtgggaatcaagttcttcataaatgagtttgtggcttatcagcaactgtctcaatacaagaacaaacgtctctctggaatggaggagtggattgagggagagaaacagtggatttctgtgagagctgaaatcattacaacattttcactctgtggatttgccaatcttagttccataggaatcacacttggaggcttgacatcaatagtacctcaccggaagagtgacttgtccaaggttgtggtcagggccctcttcacaggggcctgtgtatcccttatcagtgcctgtatggcaggaatcctctatgtccccaggggagctgaagctgactgtgtctccttcccaaacacaagtttcaccaatagaacctatgagacctacatgtgctgcagagggctctttcagagtacttctctgaatggcaccaaccctccttctttttctggtccctgggaagataaggagttcagtgctatggcccttactaactgctgtggattctacaacaataccgtctgtgcctaaggctgcttgatctatttctataacagttttgatcttaaaagctttgtgattgcaaaggtgtttatgtactcagggtgcccacaactcactcaccaagatgtttaacagtaagtaacagtaaatgtaaaagattcattttgggccgggctcagtggctcacgcctgtaatcccagcactttgggaggccgaggcgggcggatcacaaggtcaggagatcgagaccatcctggctaacacagtgaaaccccgtctctactaaaaatacaaaaaattagccgggagtggtgtcgggcgactgtagtcccagctactcgcgaggctgaggcaggagaatggcgtgaatccgggaggcggagcttgcagcgagccaagatcgcgccactgcactccagcctgggtgacagagcgagactctgtctca

SEQ ID NO: 1373 - protein, 652 aa, Homo sapiens; identical to SEQ ID NO: 1371

SEQ ID NO: 1374 - DNA, 38692 bp, Mus musculus
atgtgaagttggtcatcctaggaggcataaaagagagaggatgggaggaaaagaattagagattttatacacacacacacacatatgtatttgtgtgtaaatatataagacattggtatatatattatatacattatagacagattatatatgatatataatatatgtattttatatagggaaggtatatacaacatagagatttttatgatatatatattatatgtaatatatgcatagttatatgatatattatatgtaatatatggagagattatatatggtatatatgctaaatactatatatattatatagagagaattttttttttttttgttaatcaagacatagtctcaatatatagctctgcttggcccagaactcttttgtagattttggcttaaagagatccacctatctctgccaactgaatgctgggattaatcaccaggttcggtgagtatgggtggagttttttttttttaaataattgtgtatttgttgagcttatagtataattgcatcatctcccattatccttttctcatgccaaaacctttcgtgtatccattttctgcaaataagcaataccctacctgtccttggctcggaagtttaactgtagagataaacttaacaaatgtgttagggaggtgaagagatggctgttcttccagaagcccagagttcagttcccagcgcccacaagggggctcacagccagcggggattcctgtcccagcagatgtgatgtgatgctctctgctggccacctccagtactgcatgactatggtacacagacatacgtgtagacaaaacactcacagtcaatatttttgttaaagaatagttttaatctatagaacgccttgagaactgtggaggcagcatgcggtcttcatcctctgagcgtctctctcaacgcagatgcacctgtgtgatgaattgttagagctccagagtattttttttttaacatttcctcgttttcccccaatattatatgagtctatccaggacttattcctgtgtctccttagactcttccagaatgtttccatgaccttccttttcttcctgatagccttggtcacttaaaatttacatttatttatttatttatttatttatttatttatttattgtgtgtgtctgtgggggtacatgtattctagggtgcacaagtagaggtcagaggacagtttgtgggaatccattctctctttcatttccactgtgtgagctccagggcttaaactcaggttatcaagtttgtttgtttgtttgtttgtttgtttgttgagacagggtttctctgtgtagccctggctgtcctggaactcactctgtagaccaggctggcctcgaactcagaaatccgcctgcctctgcctcccaagtgctgggattaaaagtgtgtgctaccatgctgggttatgtcatcaagtcttgttggcaagtgtcttcatccacggagctatctctctggcctgactttgataattttggagagtgtaagttaggtgctttctaggttatttgttaactggggtccacataatgtttttcatggttaaaaatgggatataaatttttgcgaggtagaccaggggcggtgaatgcactattacaagaggtagcttgaaaactttgtgctaggtggtactggggctaaaggacaagtgttaggagaagtttgagaccccgtacaacactctagtcacactaactctacctgaggggcatccaagtgatgtggaagagcactgatctccacaaaccaaggaaggaaagggaagaagaggtaaacctgggcttcgatgggcttcctcttagagcagtgtccagcctttgctgacaccggctctgggtacaggggtgagtcttcaactttttctgttttccactttgttcttattggcctcttgaggtgtttattatattccaggaaccaaggtcaccaacggaacagagagaacacaacacttacgcaggggtgtgcagtttcaaagcagtgagatcaagccggggtagtctgtcttcacagaagatcagcgtgcctcagagtgtccattgtggtctccgatctgcagatgtattaaagggaggtgggaaaaggggaagggacttgtttggggacacaactggcaagtgacaaagtaagacctagacttgaggcaagtgtaaatcaagcttagagtccttgccaccactggaaagatgctcaagtctgccatacatatttactagtgtgtgctagggagtatctacttggtgagtgttctcagccctcaggtatgaggcctggagtctgttctctgtccttcctgctattaatgcacacagacaaaccagttagtcactgagaacgacactaagtccctttctgacatacggatgagagtgagcttattactgtatttttcttggaaaatggtttttccataagcattaagaaacttacatcttgggctagagcgatggctcagtggttaagaacactgactgctcttccagaggttccaagttcaattcccagcaaccacatggtggctcacaaccatctgcgatgggatccaagtccctcttctggtgtgtttgaagacagctatagtgtactcatgtacacaaaataaatagataaattaagaaaagagaaagaaacttacatctcagccaggcagtggtggtgcacgcctttaatcccagcacttgggaggcagaggcaggtggatctctgtgagtttgaggtcagcctggtctacagagtgagtgccaggatagccaaggctacacagagaaatcctgttttgaaataacaaaaccaaaagagaaaaacaaaacagaaaagtaagaaaaaaatctttacatttttcatttctgaacacatctactctgggaactatgggctaatgaataaatataaaacagaggagatgtttgtattttaacaatatatgaagaacagctacaagtcaatcatgtgaagataaaacagacacacagctcaagactaactaaggactatataggaagggcctatacaggaggagaaaatatcattgatcatcagaaaacacaaattcaatccacaataagatatcgcttcatgcccactggagagtttaagatgtaacactgtgaagtgtccatacgactgtggaaaacatttcctttttatgcagttatggggataaaatccagggcctcacacatgtgtggcaagcacactgagccctgcaagtgggccctgatcctcctgcctcagcctctccagagctgggattaccagtgtgtgccaccatgtctagttcctggaactcttgcacacagctaacgatacactaggctcaccattctttgcatatgttgcagagtagtacagttactttggaaaacatttggtagtttacaataaaggttaaatatgtgcccactctctggccagcaattcatttcaggtgtgtatgttcaaggacgtacatcgacttttattaaacctgaactcagaatattcgaggcaggaaaaatccatgcgtccactaatgagaattgtatgtacacactgtggaatattatgtaggattaaaagtagcagtcttgccgggcgtgggcctttaatcccagttctcgggaggcagaggcaggcggatttctgagttcgaggccagcctggtctacaaagtgagttccaggacagccagggctatacagagaaaccctgtctcaacccccccgcccctcaaaaaagtagcagtctttcaagccaggcaacacaaattagcctcagcaatgtgttaagtataagaactatggataaaaatttatatagaatgtgattctatggatctgaaattttagcagtgacaaagtgggtgtgaagtgggagaaagcaggacgtctttaggactggggtcataggactggtgatgatggaacacagcaggaaatgacgtaagggcaatggaaacactaagtttgttattgggaaaagaaacttaagtatgtatttgcttgccgaagctcatcagatggtacactatactctgtgcatttggctgaggtcaatcattcattctgacagaagcatcgaacacgacttatggtaaatgcttccgagagtccctgccttgacccaagtctttcttgggggtaacatgtggttctaactgacagatgcttgattttcggtgagacttcttttaggtcagtgattctcaaccttcctactgctgcgactccttaatatggatctcatggtgtagtgaacgcctccatgcaattatttttgttgctgtgtcataactgtaattttgctactgttataaatgtaatgtaagatataaagtaaacatctgtgtttttacaatgcatggtcttaggcgacccttgtgaaaaaattgtttggccctcaagggagtcgtgactcacaggttgagaaatgttgttttaggtcttgccgggcttccaaaaatcagctaactgtgacaagctcgtgctccttccactaaagactcaattaaatgaaatgttctcccaagtccatgagggacttctggaaaggcccaggtagatttcatcataggttgtatctggagtggcttttggtgggggtgggaaggcattcgagctcccccagtgtgggctgccccatccaactcctcccatagaagcagagcttgtctgtctctgtccaagattctggttcccatctcccctgagacccaagcacccctgtggatgctctgctttgggagagaagcgcacctgtcccagcctacaaagatcatagcccggaaaggctcgccttctggaaaaaagtcaaaagtgtaaatcaggaatggctcaatcgtgggaagcccggacaaggagtggctgacctggaagagtcctctgtgtgggaagagactttggttatcagtgaggacttagaacaaacttgactgttcctgttttaacctcttgccgcttcctccattgtctttctcactcagcttagcggaagtgttttcaccagcgtgagggcgtggtgtgtgtgtgtgcatacttggtgtgcatgtatgatgtgtgtgtgcatgtgtgatgtatgtgtgtgatatgtgtggtgtgtctgtgtgtacacacttggtgagcatgtatgatatgtgtgtgtatgcatgtgtggtatgatgtgtgcatacacgtgtgaatgatttgtgtgtgtggtgtgtgtgtgtgtgatgtctgtatgcggtgtatatgttctctccttccaatgactctggccactaacttttgacctcagtgtctgcaggaatgagcagatctggagaggaagatgaccttctatgggtgtgatctcccattcattccttcattcaacatattttctaccatttttaaagaacaatatttttattgattctttgggaatttcacatcttgcacccctatcatattcatacccaagccctcccatgctggccccccaactcttatggaacccccctcaccttccctccccccaaaaaagaagaaaagaaaggagaaataaaagaccaagtccaattagagttatccatatccttctggagcatggttaaactctcagcggcttgtcccttaaatagagctgagacctccccctcctgcacccctgccagaagccatcgattgtggagagctaacttcaacatccctatcacatttttttcttgtttgtttgtttgtttttgagacagggtttctctgtgtagatctggctgtcctggaactcactctgtagaccaggctggcctcgaactcagaaatccgcctgcctctgcctcccaagtgctgggattaaaggtgtgtgccaccacgcctggtccaatcacactttttaaagtgttctctttgatggcttcctgttcaggctgctactcttttgggggtagggtgaggctcagagttggggtgggggtaggggtagtcacagaagcttccatgtcccttttattcaactatctgtcttccatcagcaaaaggagcttccttgctcttcatggttagtgggagcatggtcacgggctggtgacagcacagaccacagacacagcccttggcttctcacatcaatatagcccttgaccatggacatccaagtggccttcggtgtcaacctagacatcaacacagaccaagggttcagacacggcccctggaggcagcccagatgtggacatcaccatgaactcaggagcagggcaggtcactcacatcagcctggtccccatggctgttgtgtctccagttccacatctctctgcacgtaccactctgtttttctctttttcttgtctttccaccacatatttattcattgtagtggtgcccactgtctgcactgtgaggcagggtggcctagctggcttccgccaccagcgccttagggcaggtggccttcttattttctacctttaagtttattgaacactgggtgtcagtcttgcttcttgtagctaaagtaaaaaaaaaaaatgagtggagtggacctttgtgttggggatagcataccaatgacagagactgcctgcagcaggccaggatggacacatctcacaagctccttgttaaaaaaaaaagaaagaaaagaaaaaggttgttcccatttctcctaaccttagccccagacaacagttgtattgattttatttgtccgtgactgcttttcagttggccttggtgtgcataattattctattatatctgactttcttacttctttcttctgctctggtgaatgctgtgaatctagatgttccttgagtaatgattcttaaacaattaaaatttgaggcatggggcacagtcctaggtgtaggctgtgtgttctcatcttggaaacaatgcaataactgcacaatggtagttccagattaatgtttgacttgcaaggaaagtttgaagaaatcatgtttagaaatattagaaaatgtaacagaaccacgtactgctagagtcgtatagagtccatcaccagaaagtgaaggaatttataggaattatgaaaaagcataagtacaagagacacaatcatgacataagggaacacaaacacaggatactttaattcagaaaggaaaaatactattgaagttataaaatgagttttgcacatttgagagtggttcttggataagcaagtatagactatacaaaatctcctactagtaaaatgaagtcacaacactgggactcttagaagagtcattgtgtgcaatgtgcagaagcagaagccagcagaacggctgagttaagggttaacttgattctttcgggccactgcctggcagctttgcccatgtcatttatcattagagcttcacaggaaaacacatatagctgacctcggagctctgaagtgtaataagtcaaaacttaaagtgtaaataatgataagtttgcaattattattattttggccacaggcctgggaatagggaaagcttgaagctttggggagcaattgtaattcttgattctttgtgggatgtggatattctttggaatttgatttggcaatgattattctaagcctttttcctacctacttttggagtatcattaaaagactggggcaagttaaaggagagagaatgaatgaagagaaaaactgtggagagagtgtggagagtgcgaggagagagaatgtgtgtgaggacagagtgtatgtggagtgtgtatgtggaagaagaaggagaagaagaggaagaggtagaggaagaggaagaagaggaagaggaagaagaagaggaggaggaagaagaagaagaacaacaacaacaacattatttggagtgagagtgtgagaaagggagcgaacgagagagcacaacccccagcccaaggagggagcaaaagtatgtgcagcttcaagctaagagagagagagagagagagagagagagagagagagagagagagagagagagaactttaagccttgaaaaattgcctgccagtttgtacctgaaaagttgtctgtgtgtgtttattgtgcaccttgaagatatgcctgcttccagctgagaactccgatcccctacacctttgtgttctcgggaactcccatcctcagccattgactaagtactgcatactggtgtgtactaggtttctgagaatatagaggtgaagaaggcttgtaaaactcctgattttaagggcatcttagtctagtacaggggaatgcacgttaatggggaatgtatagctctgagcaaaacacaagcgaaagttcgaggaagaccagagaatcacccagcacagaaaaggaaatgagaagccaagagacacaaactagatttcaagggattgggcttcaacctttttgtgtctgaatcactttctaattcttatggactcatctgaaaatctcacatagcacttgatccttcgttcctgagatttagggatctgggaggaactctggaacccatctaaagaaggttctgtcagagacaggagcgatggctcaacggttaagggtgagaactgtgtttgcagaggactaacacttggtctccagaactcacactgggtgacccacagggtgaccctcaattgcttgcaaccccaccccaggggagctggcaccctctttctgaaccccacgggcaccacactcatgtgcacacatatctcacacaggtatacacatattaaaaataaaaacatcctaaaacagaagatctggcaaagggatagagccttagaactgagaaggagcagagattgtgataatgttgctgtttcagaagaagacttcctgtcctctaagaagcaagcctggggctggaggtgggggcatagaccaacgatcataagggctcactctcattggcaggttggtggccctgattggctaagggggtacagacagaactcccaggagtgcccagggatgccattgctgggacaggcttcatctttagctaaccccacagaagtctttgtttagataggtaagttgaggctcacaatggggcaatacccaggtaagacaacagcgtccctaatgttcagatctcggggatgccagttaaaggaggatgttgggttccctaggattggaataatagatggttgtaaacaagcatgtgggtgtgggggattgaaccttggtcctctggaagagcagccagggctctgagccactgagccatctctccagtctctctgtagtagctttgttcttaaagaagggagggagtccttgcaacacttcctaatcccttagtgcagacatgattggctgtggtgaaacctattttgatatctctgtcctccccgaggcaggtcctactggcacacccttctctgctctggaggtttaaacaaacagccagctggcatgagtggttcccatggtaatttgtaatcactttatgttctatttgttacaacacgtaagatttatgtttctgaaaaatgcatgctgatctcggtataacctgcttgcttgttaacactctcctcgttttcaagtcaacagagacaaatacttttttcttttttctttttgatgagtgttaggagggtcgggacttcgaaaagacaattagagtaagcacttgaaaggacagccaataaactttaagaacaaggagactcaagataagttagttgctagcagcctaattctaattttataacacttgaggggctaggagtactaacttacacacacacacacacacacttagaataaaaggttgttaccatctatacaagaagatgtttggcattggttatgcgcccatggcactgcttagaagaagccagaagatgaccacagttactggttgcattgccaggggaagtgggttggctaacagggagattgcattttcctgagggcagttctctggctgtgttgccccaaccggaggaagtggtgaggcaagagcttagagcatcctgtggccatttgttatccttttgttattaatgatctggaagcaccagaggccagtttgggatgccaaacccctacctaaccagaagaagagaagaaaggccactgccgaggtcacttccagtacttggaggtaagggatgcaagggaaggcatgcatttcaactgtgaagagttccccacccccctctgagaatcagtgggaagtcacctgcctagtcatgccgggaaggcaactgcctggcacttctattttcaacagtttcgttcaccatccatctctctctttaacttaaacagaatttatcacttctttaaaatgtgtatgagagttttgccctcagaggtcagaagaaggcatcaggtcccctgggattgaagttacagttaatcaccgtatgagtgcagggaactgaagcagagtccttggtatgcttcacgagtaatgagtactcctaactgcggagccatctctcatcatctctatggttcggttcgccccatgccctatggttgtgatgcaggagaaacttgaagcatcaaaattgaagccataagaaaaatcaccaataaacttgtctaggaaatattgctatgcaaagtagaattacctttgttttggctcaagactgtgagaggataacttagagttaagcctgaatcgcagccctccctagcttcaaggggtctggacaatgatttttaacattcttatctctactacagagatgtggttgaaatgggtgttttgtgaattaatatataaattctgccacaatctttgcttttcattgaagttatgattttgtgccagcagtaatggtaatattgtaatgataatatcataaaacatttacttattgtaaaacaatattattcacagtcctattttcagctttacactacaaattgccccatgtaatgttatcaattcattcttttaattctccctttgcccaaagttgtgagtcgactatggcaaaaaactaattaaacactactcttaaaatgtctgcaacctgtcatctatttagcttttctttatccagtacatttaatgatcttcggatacaatcaaggcccagggcaaagatttgcaagtcttgctctttacttaaaactagaatgatgtttatctttcagggaaataatatgtttgtctaaagaattgtgggcatgagtcatttcaagtgtattttaggggaagagagaggaaaatctcaaacgtagatgatgaaagctgcagccagcgtggagcctttcttcccattgtcctgagcctccttttcttagccatgaaaactcttgttttggagttctctgacatggtcttgccctggtgatgatagccttcctccatctccctaggttctggttcttgaacaaagtgatttctttcctaccagctctcatctcctaaggatgcattcattggctttcaaatatcgaactaatgaactcaggtccagtgccttgcaggcataccaagtacattgggaatggatgtgagatttctacatagagtcaagctgagtcttaagtctttttagaagttgtctagaaagtgctttgtatacccactgatgtctgtatttctttctttcctagtggccgatctttcataagactttattggtatgaagtgaaattcgtgttgtacataacttcgttgcccatgatctggggtgggatgtggaggacagggggatgagggaagaagtgtgagcaaggtaccaggatctgtggccttccttccttagcatgtggaaggagagggtagagggatgcttcggtcacttttcctgttgtgataaaacatcctacaaaaacatctaaagagacaaaaggtttcttgtggctcacaggtaagggttagtccttcctgttggggaagtcgaggcagtagaataggaagcagctgatcatgttgcagccatagtcaagaaatggaagaacggctgggcggcggtggcgcacgcctttaatcccagcacttgggaggcagaggcaggcggatttctgagttcgaggccagcctggtctacaaagtgagttccaagacagccaggactacacagagaaaccctgtcttgaaaagacaaacaaacaaacaaacaaacaaaaaaaaaaaaaaaagaaagaaagaaaaagaaagagagaaatgggagaatgggtgttgttcattcattttctccgcttgtatactgtgtcacccggggaatcattccccctcgttttaagatgggtcttctgaagtcagttaacgtaattaagatagtccctgatatttatgcccagaggtcaactaatcccctgtaggcgtgcagggggcaagtccagatcttgtcaaatagtcaccacgatcacagccagagtccttgtctatttgacaacagaacacgccacttttgaaccgtaattcaccatctcttgatttcataggctcgtgaaaaatgcattcagtcaaatatacagagagattatagccatcaacaatttaaaagtcccaagtctcttaaatgtgagcacctctaaaataaagataaattacagactcccaacatttagtggcatggaataaacatcctcactccaaaatggagagatctgggtgtggcaaagagcaattggaacaaagcaagcacggaatcctgctacttcctgtctaaatggggcctcctttcaggggctctgacaccgcagcacattgcctggcccggccttctctttgaactatggagcgggccaccaagactcctcagtcttgcgtgcatagtgtcttcatagccgatgctacgtggacaattctgccaggttttgctcccagcttgaattgtggactgccgtcctcgcatcagtttctgtgtgctgtgtctagggaaccgccttcctaggcagatgcttggaggagcaagacgctactcaccttaggctattttcctttcaaacaatttggagctttgaaggttagggcctccaaacggtgaacatttgttctcgagacacatttttctcccctcattttttactagttgaggatttaaagcaaaatggatttgatcctttgcactccccccaccccagttctccccagaatcatccttacccattcacttaattttgcattctcttcttaacgcccctccccccgaaaccttaagtacattttgtgccgcccataaacgattggatgtgttattttccattggagtatggtcaacttaccaggggcctctcctttaagaataatgattctctcttttagcggctattggttgccggtagctccttccctagggagtgagactttggtcccatcttcggttaccattctgggatttatctgccttgatattgtgcaggtcttacacacgctgtcataagtactctgagtccgtacgtacagctagagaatgacagttaactagctccttacttaccccaaggcagtcaaagtccaccactgtgttagttcattagtcaactcaactagtggttgactcaaggacttctagaccttttatttaaaaaggcaaacaggtttgccttactcataggattcatgttaaacaatgtaactttttactattcctttatcttttttaaaaaaatatttatttatttatttttactatccctttatctaaaggaagtcactttacaagcgactgtttccagtaatcaaccacctgtgtctcgttggtggtaaataattgaataggaaaaagatataagacttatgtaaggcctgcggatacagaagcctaagttatgaggacttagggaagtgctttaggatctaggaaggtattttaaggttggtgaaggcaagtgaaaacctaaatggtggtcagaagtcgaattaacctatataaaagaagtgacaacttaaggagaaaactagtcatgcaattgggagcattacagacgtcctcttgagttgctcttctaagttggcaggtgtttcctgttggtaaatatcctccagagagttctatttaaaattgagctattaataaaagtgggtgcccctgtcaaaaaaaaaaaaaaaaagaagtgataaacgcatctggtttcttcccctcactgtgctattgttctcttggattgagacttctaagttcagagtcctaacactgaccgatggagcgttgataaattattgatttaattctggtaaagcctttcactatttgatccactatcatggtctcgagttcaatattttaaatttcctttggttgtcttttttctttaaacaatttttttattagatattttcatcatttacatttcaaatgctatcccaaaagttccctatactccccacccccaccctgctccccaacccacccactcccacttcctggccctgggattcccctggactggggcatataatttttgcaagaccaagggcctctcctcccaatgatggctgactaggccaccttctgctacatatgcagctagagacatgaactctgggggtactggttagttcatattgttattcctcctatagggttacagaccccttcagctccttgggtactttctctagctcctctattgggggtcctgtgttccatccagatgactgtgagcatccatttcagtatttgccaggcactggcatagcctcacaagggacagctatatcagggtcatgtcagcaaaattttgctggcatatgcaatagtgtctgtgtttggtggctgattatgggatggatccccgggtggggtagtctctggatggtccttccttccatctcagctctgaactttgtctctgtaactccttccatgggtattttgttccccattctaaggaggaacgaagactcacatgatatgcactcactgataagtggatattagcctagaagcttagaatacccgagatacaatttgcaaaacacatgaaactcaagtagaaggaagaccaaagtgtggttgtcttttaagtacagacttaaaagtgtttcttcctgtgctaaatctatatatacccagtatacccagtgttctggaaagagggaagaagcccctttttcatgatctgtagtcacactgacaagccagatcaagcaagctttttgccctcctgccccgtagaaggttccggttgggcctgagctcacctcagagagcgttcatgcttttcactcaagaccgttaacccagaaaagatgtgtgtctactgcctttttttacaatgtggatttcagtatagattacaaacagtggtgctgctaacacgtctaaaatgtatctttttgtaaacttcgaaagcttacttgtaagcttcagagaatccacttgagcccacttctcaagggtcaaatggactccagagaagcacccctgtcaatcaacagtccacgtttcccacttcatgccattccagagggagaattccttcccctgtccctggttctgggactcaagtttcaaatgtgcccttatttatttatttattttttctccttaacctgcttaactttatcctctgctgcaaatgtagacctgttccaacatcctgccaagtccaggtgcttactcaaattctgcatccaggacagctacaaagcagacatacactctggtccaccctcacagacggtttcaaccggaagcactgaagtagccagctctcgggagacttggccagcatcctagttttcttagggtccccaaagacatcacccccagtcagcaggaagtagtctaaagaacacagtgacctcactcctgcctgccatcaccccttccaagtttctcattcttaattaaatttttaattaaacagaaagggaggaatgttagcttacagaagattttggctcctccccagggccctagcaacggcttatgtcatcttctaccactgctgccgaagccaggtgtggactgcctataaaaggacttcccgccatcccagttctctctctctctctctctctctctctctctctctctctctctctctctctctctgtgtgtgtgtgtgtatgtgtgtgtcaattccccaccctttctctcctgccccttctctctctgccctcttggttcacttactacctctatcctttcccaggtcctcatgcctctcccttcatccaataaactcccctttataccagatctgttgtttggtgtaatttctcaggggtacaccttagcatgggccggccaggtgcccccttgctccgtcatatttcataacaatgaggaatcagttcaacatggagaaaggaatttttactcccctgatagacttattcatacgggctagcttccatagtgccagaaggtgctgtgcccaagttcagactgggagctacgcaacaactggcctagcaagccatgcccacaggtttactaatagtggcacgcggatgtcatgggagtaccaagactttttcattggatttaaagcatcttccatatggggtaaataaagtggctctcataggctcataatcttaaatatttgatacagaattggtggagctgttgggaagatattgtggtgcttttgggggtgtggtgggagtgggggtgtccccatttgtggcttgtgcctgttgttctgccccagctccagctcccagctttattgctcaaacgtcacatttcttatacaaaaagctattagcataatgggagataaaccccaccccccatggcaatgtgcctttctttggggaaggtgaggaagtgacaaacatttacatatcctgctagcctggcaccacaggcacagcaattaacaattgagaatggaaggacacccctccatagccagtcaatagtgtctgtgtaggttacaccagccaaaggattaggaggtatatatggccttgttggagaagctgggtcattgaggatggcggtttgaggtttcaaaaccccacactatccccagtgagccttctgtctctctttgactcctgcgttcagatcagatggaagctctcagctgttgctccggtgccacacctgcctgcctgcctgatgttccaggccacacctgcctacctgcttgcctgccaccatgctccctgacacagtgattacggactctaactttctggaaccatgagccccagtaaatggtttccttttttaatgctttggtcatgttatcttatcatgtcaatagaaaagtgactaagacatctcataatttgataccaatatttgacaaagttcttggggccaagaacacatgactagataggataaaggtcctaggaccctttccttattggtttactacagcccagggtgtttctctccagtggcgtttatgtctgggacaattacatttggcttcgcagcacaagtctgacagctctgctctcctggcactggagaggccgagagatggttaccttctcctagtttaatgtaaaaaataaatctatttttcctcccctgcccctgctcccaaaatgatgactctgaagttaattatttattaataaatgcctaagccacaagctttggcttattccccgactagctcataacttatgcaatcattcaaactattttatatcttctacatggttagttacctctcctcagcatcatgtgtccatgtctggggtgaatctcctctccattctatctcgagttcagctacttggctggtttacatcggtctccctagcattcctgactaagattatggagttaggcagtgataaggaaaagctctagagggctggagagatggctcagaggttaagagcactggctacccttccagaggtcctgagttcaattcccagcacccacatggtggcttgcaatcatctatagtgaaatcttgggacctcttgtggcatgcagatgtacatgcagatactcatacgttaaataaaaaacttttaaaaaagaaaaagaaaaagaaaagctctggactctacaaatagacagttgtaatggttacctggaccgagtaatgttttttgagatgcaataatttgagttggcagatatctttttgtgagtgtgagtgtgtgtctgtgtgagtgtgtgtctgtgtacctgtgtatgagagtgtgagtgtgtacgtatgtgtgtgtgcacgtgtatgaatgtgtatgtatgagtgtatgtatgtgagagtgtgaatgtgtgtctgtgtatgtgtgtatgagagtgtgagtgtttgtatgtgcacatgtgtgtgtgtgtgtgtatgagtgagtgtatgtatgtgagagagtgtgtaagagtgttagtgtgtgtctgtgcacatatgtgtataagagtgtgagtgttcctgtatgcacatgtgtgtgcatgtgtgtgtgtttgaatttgtgtgtattagtatatgtgtgtgcgagtgtgtgtgtctatgcacgagtgtgtaggagagtgtgagtatttgtgtgtgcacatgtgtgtgcatgtctgtacacatgtgtgtgagagtgttagtgtttgtgtgtgcacatatgtgtgtgtctatgcacatgtgtgtatgagagcatgtgtgtgcacatgtgtggtgtgagtgtatgtctgtacacatgtgtttatgacagtgtgagtgtttgtgtgtgcacatgtatgtgtgtgagtgtatgtgtgagtatgagtgtatgtctgtgagagtgtgagtgtgtgtgcatgtgtgtgagtgtgaatgcttaggttacaggatatactcaacgatgcatttttgagtaattgaatggagaaatgtttcaagatagatggaagagatggagttagaatttgagttctgacttagttaaggagaggtgtggccaaacagaaggtagcttgggttactccggagttactgggttcagagaaacctaagctcacaaaggcaatttacttactatgtaattttaggtgggtattcccagtggagtgagtcattctaaacctcttctgaagtacatttgtagtgtaagcagtttacgatttttaatcatgagagccaattctaattaggctgtagatggcagacagtaagtcccattctattttctatgtacgtggatgactaatcaaatacagtctttctcacgagttctccaaagaagttccggaagccattgccaatcagttgtttggtgtcagagaattcagagtgtctaagactgtacactatcagaggtctttctgagaagcagccgcataaacaactcaagacaatgagttgtacctgagtctcttgggaggctggggatgagtagttctcgagtcagcagggatgcagttagagggcttctggtcctcactcccagggagagacaggagaaccaggaagtatggccaactcatgtcccctccccctccactcacacccacgccacccactccccacaggaatggaaggaagaggatggagatgcctcctcctcacttcctgtgtgaaattggctcacagactgtgctttcttccttctgcaaccatatataatgtatgcattcttactgtgtggaatgccgcttgattagccgcctgattggggaagatgccaaaatattttcacatggaaatatcactggttgagaattttattcttaatcacaggaggaagaataacaccaaacataaaagccaccatcaggggcaggtcttcatcattatctccttctcctccttctcctcctctcctcctccttttcctccttctcctcttttcctcctcctcctccttctctttcttctccttcttcctcttcttccccttccttctcctttttctcctcctcctccttctctttcttctccttcttcctcttcttccccttccttctcctttttctcctcctcttcctcctcctccttctcctcctctttctcctcctccttctcctcctcttctcccccttctcctccttctcctcttcctcttcctcctcctcttcctcctcctcctcctcctcctcctcctccttcttcttcttcttcttcttcttcttcttcttcttcttcttcttctcctttttctcctcctcttcctcctcctccttctcctcctctttctcctcctccttctcctcctcttctcccccttctcctccttctcctcttcctcttcctcctcctcttcctcctcctcctcctcctcctcctcctcctcctcctcctcctcctcctccttcttcttcttcttcttcttcttcttcttcttcttcttcttcttcttcctctcttccttcctgcccccttcctccttttcccccctcttcctcatctttctctcctcctcctcctcctcctccttctttttcattttaatacctttccaggtcattcctacctctcctgtgagatactttacacatgatcaaatggttctcttagatgaggtatgagccacagacagattctgaaacatgggcaaatgcacaaacctcaaaggcattccagcaacaggagcttgacaatattctaaaggcatagccatgcccctggacatgtgaatgggggatgactgaagaaacaggtacaggtgactagggaggactgcagagacttatgccaggagtctcagcactggggagactgagacaggaggataaactatgtatgttaaaaagaatgagtggagtatggtcacccatgcctttgatcccagaatttgggaagaagaatcagggaaatctctatgagtttaatctacaatagtgagttctagatgagccgaggctgcatagtgagactctgtctcaaaaatataaagcagaaaaaagaaacaaagaaacaataaacaaggaggctgaattttcaaggcataagtattcctaacaattggtcaaacgattgttagtcttaattcattaaaaagaattagtagagagatacatattattaaaaattgccaagttgatattaagaattgtggaaacagggttggagagatggctcagtggttaagagcactgactgctcttccagaggtcctgagttcaattcccagcaaccacatggtggctcacaaccatctgtaatggaacccaatggcctattctggtgtatctgaagacagctacagtatactcatatataaataaaataaataaactttaaaaaaagaattgtgtaaacaaatgaaaagaaatcttgactagattaagttgaaagcacaattagtgaattggaagctaatactgagaaactcactggggtccataacacctagagatgaagaagaaaaccttacaaggacagacaggacaaggacaacagaaatagaagagctaatacgtagccactggagctttcagaaagagaacaaagaaaacagctgagaagcaatttccaagagataagggaagatgcacacctccaggttagaagtgcgcattcatactcaaagatgatgaaataccgaaacctgactcagcacaatttcggaccgtggctgcttagctcatgctttacttgaattaaactgaccaggttccaacttaacaagcaattcaagcttcgccaagagctgctccggattgctcccagcgtttcctaggtcctactcatccctgggaaggcagctcctgaaaagatgcactcttgcctgccgctctcaacaaaggtgcattgctgcactcggagatgtgaccagagaaggcggtgtgtaggcaagggagaggcttccaagagcagaactggactttccagattgccatgaccaggaagtgcctcctctgtcaccagggagggagtgctcacatccttgacttaccaggataaaatgtgttcccggggctggggatccctatgcggattgcttgtcacacttccatttgggacatcagagttttcattgcagtttttctgttgacattttttttttacatttcgcactgggcatactggaagtggttcaacttctaggtgtaacctcatctataaagataaggtcctttatttgaatttaacagagagaaccactcatatccagttcctcaaatttttatatttcctttcagcgtctgagctcaactaggactgccagtgtctttgggggcagagcctgctctgaaatttgcttcggatcagggattgactcttcagtgtgacatttactccactccattgctggcttctgtgctggcaccttgggtggtcgtcccttcaaagagttccttgtggcgggggcgtggcttcgtctatctcctacccagggtttccgcaaccacctcagcacttcaaaccacaggcctttctcattgtcaccttttgttctaaaaccacagagatgcacaaaagaacacgctccctccctcattcatattcattgacaaataacatcctgggatccaggcaaaaatgtgtcaaaatgctagtgatttgggaagttgcttcaccaggtcaagcttctagtttgtcccagagattaatcgttcagttttgatttcccctgttttctttcgctggtactcacgtgatttatctttgattgacacgtcagtgtcagtcttgatctgtggtggttgaggcgtgagaattttcacataaatgaaatgcttttctttatccataagtcctttcactggcttcttaatttgcaacagcaacacctggtgtaaaacgaacaggtgacactgtcaaaaaaaggtgtcagtcgaagtattgcgttttctatttagctctatttacttactgaaacaacgtttcactctgtagctctaacctgaaacttactatgcagcttgtgactggtcagtttgtggtaatcctcctgcctcagcctcccacgtgttgagattacagggttgagccacccggattatttattttcttggatacagagtcttgttatagaactcaggctgatccactgctcactaccacccctcctgactgagattgcagactgtgtcgccagagccggccctaccgtggatctttaaaagtacacgtagtgttgcttcccccaaaggcatgtgaacactttcagaagagaaggcctcaggatgacctcctttgaccccaggcaccactctgctgccaggttcctcttcctgccctggcattgatagaccatgaggaagaaccaattgattgacccctgacatattctttttaagccagtgttttgaatcccaatggataatgtctcatgaggagtgtgtgtgtgtgtgtgtgtatacattgctactagaaactatggagccataacggttgtgacagtcagggttctctggagagacagaaccagagcactgatagaaccagatactgtcaagcatctaatggtcagagcaagatggactactgtctcaaagcctatgcctgagtatcgagtctctccttagaaactgagagcttcccatgtgcctagtgtccacagaccctcagctataaagcaatgtctcctgctgtgggctttcagctcctcatcacatctttcccacacaggagaaagcaacgttcccatttacagctgagtaacaggagccacaaggtatgtctgactcaaaagttcaggctctcgatgactgtgcggtgctgcccagtgtgtcttcttcaatgtaacctcaggacctagaacagcaccttgcatgtggtaagcaattgttgagtaatttttgcacaaatgaatggatggatcgacagagttgaatggatgccaagacagtgtggaagtcaatttagtgaatcatttgtaggttaggataggattgtgaggatgagcctgtcattaagcaggctctggggttgactccagtgctttagaaaagctgtcttaagttctcgagttgactcatgatgtaacttgtgctttatcccctctcctatttcttttactacaagctgagagtttgacctgcatcagaggctagaaaacattttctgtgaagtgccaaacattaggtattttagattttgtagtaaatgtttcaggattctgttgcaactatttcacactgttgttacagtggatgaatagacaatataaatattccaataaatcccatacacacacacacacatatatacatacacacacatacacacacacacacatatatatatatgtatgtatatatgtatatgtgtatgtatatgtgtgtgtgtgtgtatgtgtatgtgtatgtgtatgtgtatgtgtatgtgtatgtgtatgtgtatgtgtatatgtatatgtatataaagaaaaaagagcctatactggctgctcttccagaggacccgagtttatgtctcagcactcacacactggcccttaactgggaacttcagttccaggaaatctgctgccctcttctggcctcctcaggtaccaggcacacaagctgtgtacagacatatatgcaggcaacatacccattaaaagaaatatatctaaacaaacaagcaaacaaacaaacaaaaaaaaaacctctcagccttctggatcaggctccgggactgtagttatgctccttggtccagacaacttcagcgtctccctctaaccctaacgctgtatgatttaaagatttagaatccatgatgttgagagtagcgatttaccattcatcattatcttgttccagctgctcataagaaatattgttggttacagggttctttctgatgaaaagagctgttttcaaatagtcagtcaaccaaccattaatcacaaacagaaagatctaggtgtggagttctcatctcgactctttaagaaacaaatatttagaaaattcttggcacggaggaagataggaaggaacacagagtggaaaggagtggagaggagtgggaggaagcgagaacaaacccttatccaaccagtaagcctgcccaaggtgggaagccagaccttccatttctctcctacaacctctacaagtttgctagttagcagccagtccacaccactggctgtagtaactcagtacatactgatttttttcttcccttttctttggcaccaaaattgaaaccatggaataatttctgcataaaaggctctgctaacagctggctcctggcttagagaataccttgtggagcccagtacttaacacatagcctttttgtgtctgtttcaatgtctacaaacttcctttgaggaacaagtgggaaaattacaaggaccatgacatctcaacatccatcatggctgcctcaataagacctggataccagttgacatgccatggtggaagggggaatctctcggagcttcacccctagatgataaaatacaggtacttaaagattgccaagagagggggtctttcctaaggatgagcccagttggctatctaatatcaagtgatcagccctaaaagacatacacacatgagcagcactaacctgactcagtaggttgtatcagtatatctattcatatacacgcagaacagtaataattaaagaaagagaggccaagagaggccgagaacttgagaaggaggagggtggggggtgagattggagggggtagacagaggaggcaaatggtataaatgcacaaatatggaatctacagagatggtgccacgatgctgacgtaaggctcaggatttgcaggaaggctcgggatttgtaggaagggaatcttgggttgaagtctacagagaacgatatctcttctgatcattggatgcaatcaacacacaccagggagcatccatagtgggcggaatgcatggcagccatagtttttggctgacatctgaagcctgtggaggatttaggggtaggaagaatgaattcctttaacaagtcaaaggacaccacagctccacgctgattgcagcgatgagtaagaggccctgtctctttcctccagtccgcatcagtgatctctattagccattgatgcaattcattcattactttaagggtcattttaagcccttaatcttaaaaccagtcccaagttgtttcacgactaagagactgagctccaacaaggttggctgaaggcaaggcccttctgtgtgtaactttcatttgtttagggattgctttccaggttccagtcatggaatgggcaccgggcaaacagcggtgcaaatgatttggcagaaatcaacatcagttggttgagccatgcgtcatcttcatctcgagaaggaatttgtattgagcaataggttagagtttcaaaatcccagaaagtccaggaacattaaaaaaaaaaaaaatagaggtgtatggcagagtttcagccgagagtccacgtgtgatgtctcagcttcaggttagggtaacccttttgtgactggttcttctctactagtgagagcaatagtcttgggatttcacaatgctcagggctcaggtgatcacttgcaatgtccctctgctgataacttccaagacagcttctgtcattttcagctctcaggtggttactctgatggcctcatggtcctgcctgaaacagaaagtctgccacctacttctgtagcagcaagactcctgttctgtggctaagcttcctgcctgtgcaagagccacagggaggggccaaatgcatgccactggggccacgcctcctggtaaagacataaatagtgatcctcgggactggtcatcagagctcccctgccttcaccatgaagtcctgcggccttttacctttcacggtgctccttgctctggggatcctggcaccctggactgtggaaggaggcaaaaatggtgagttggagttgctttggtccaacattgcctggagtatcagaggtgggggctcctgatggtttgggctgtttttcagtttactctgacctcagggcgacatctgtgtctcgctggggtctgaggtcttgatgaagtttcaaggcatgtagaggtgctcctcttatgcagccatcctgtcagctcaggtctcacacagctctgtccctgccctttagcctttctgtttgtttctgtctctggctttagttctcagcatctcacatattagttcccttcctatttatttctcttggtctccattattcctgctcccaccttctgtctttgtgagatcttgcttagccctgaggtagaaaaccttgactgggagcccggtaccttttatcctcagtctgatttttcctggtcacatgtcttggttgaccaagtctgacttttcctccctaggtcagcccggtatttctctttgaagttgtgggccactggaatgagggtctatattctgagatgtggaccttcgtctaggaatgatgatagtccgtaccctcctaacatcttgagcttctctttagatgctatcaaaatcggagcctgccctgctaaaaagcctgcccagtgccttaagcttgagaagccacaatgccgtactgactgggagtgcccgggaaagcagaggtgctgccaagatgcttgcggttccaagtgcgtgaatcctgttcccattcgcaaaccaggtgagccagcagagaaaacagagaggggacaatcaacgtcaagagccacccagagtgaatgaagagtccctcccaggcatccttgtttctaagagctgttgggtccaacatgtcagttagtcaaggcctcttgctgccattggcaggaagagccatttgcctgcagttgccactctgtgaggatgatggctttacaaccattcggccctttcggggctggagagctggtcccctgcattggctggaggctagatggtagcgaggaagcaggtcctctttcaggaggcgtgtttgggaggaggtgacaaaggtgatgggtggatggggacgaacttcctcgctcaggaaggagatgttgggttaaagacatggagatgtgttgcctgagccctaagacatcggccctgtgaatcctttctcaacagtgtggaggaagcctgggaggtgcgtcaaaactcaggcaagatgtatgatgcttaaccctcccaatgtctgccagagggacgggcagtgtgacggcaaatacaagtgctgtgagggtatatgtgggaaagtctgcctgcccccgatgtgaggtaaggagtgggctggggtaggcagagctcatttctctccagcccttttctgcttcaaggttctggagctcgaagcacatgcgccaggagattctattctaatcaggagcccctgtctgtttgccgtttaagggaactgtcccctgtttcttagggcaaagcttagcattgcctgaggctttgatcctgtggcagcctgtcagggtaagggcctcgggtgaatggctctcagagtctctgcctgcacaatagaaataccgaagttgaagttttgcgaggcacagtatacgttatttgcttcccatgttatttacttcatggtgtctctctggtcagagcacaaaggataggtataatgtgaggaatgtctagctcagtgctctgcgttttgagttttacaacgacaacgagatttgaacctgttctcctgaaaccccagatcctctcaagtccagccccactttaccctttgaccgttctcagcatgctcccttacaagggctggataggaatgatctagctggttcctatgttgaaggtctttccttactttctcttgtagcctgatccctgacattggcgccggctctggactcgtgctcggtgtgctctggaaactacttccctgctcccaggcgtccctgctccgggttccatggctcccggctccctgtatcccaggcttggatcctgtggaccagggttactgttttaccactaacatctccttttggctcagcattcaccgatctttagggaaatgctgttggagagcaaataaataaacgcattcatttctctatgcacaccgtgactctgattcactgaggggatgagatgggtgtggtaggaaccaataaaggaaggatgggaacgaggcctccctcttacattccgggaggagaaggatgagaattccaggcttgggcatgcttgaaccttccaaatatcatgtttttatctgcaaagtggcaacagggaccgctttcttacaacgtgtagtgcaccagaggttgcagaatggtgcaaagtgtgtgtgtgctatacagctgtgctttaccagagtgccttcacacaccacggccacttattgctacccggcgttatgaaaatgcggtgcatgtgtgtgcacgcacacacatgtgcagtgtgcttacttgtatgtgtttttgaaggacagagtaggacaccaggtgtcttcctctgtcactttctggttattaccttgagtcaggatctctgtgctgaaccaaaagccgaccaatcagggctgggttcgctggtctgcccatccccttcctccggttactggggttacaggaaaatgcaccacacccggctttttatgtgggttccggggatttgaactgagttctgcttgtgcagtgaacgacgtgttcactacccatctccccagtgccccgccccacttcacagttctactaaacatacactgcagaagaagagacgggttccagtcagtgtgtgctccgagggtagctgcaatgatggcaagtaaaatgtgaaaaatgagaaatcacccattttgggagtatctccaacactttgttgtgagtgtgactgctggaggaatggctcagcagttagagcactggctgctcttccagagttcattcaattcccagcaaccacatggccactcacaaccatctataatgagatatagcgccctcttctgtcatgcaggtgcacatgcaggtagagcactcgttagacataaagtacacttaaataacaatcgaaaaaagaaaaaagagtaagactagaaataaacatgaagggaaacgcacctgaaatgatgtttctaaaacacatattaagttgaatttccaatagacttctcactgaggtcagaaacagcaggggaaacactgttctccaacaatgtacaagatatctaaagcaacacaggatgctacgccaatggagtgtgtaagatagggacagacgctttcccagcagctgacaagatgcctaaagcaacacaggatgctgcactaacagagtatgtataagataggaaaccatacaaaatggtcatgtttgatttctatttttaagtgtaagtgtgtgtgtgtgtgtgtgtgtgtgtgtgtgtgtaacaaagtcttatgtagctgagactggcctcaaactttttatgctcctgcctctacctcctaagtgctgggattatgggtgtgtgcctgccaccatttttgcctatcttaaatattatcattttatatggcaattttataacactcaataacattagtaagccaagattcatcaaagttgctgggcatacagcctacacagaattctagaacattccaattaacaataagaaataacacacatggagctagagaaagtacccaaggagctaaagggatctgcaaccctataggtggaacaacattatgaactaaccagtaccccggagctcttgactctagctgcatatgtatcaaaagatggcctagttggccatcactggaaagagaggcccattggacttgcaaactttatgtgccccagtacagggtaacgccagggccaaaaagtgggagtgggtgggtaggggagtggggaggagggtatgggggacttttgggatagcattggaaatgtaaatgaggaaaatacctaataaaaatattaaaaaaagaaataacagacataaagaaacaaactgtgcaaaaaaatctctaaacaataaagttttgacaatatctactgacttgaatggtaatctctagaagttattcattttttgtcccccccccataattaaaagattaatttgtatctgctcttttaaaattggcaaattataattgtgtatatttatggaatataatatggaataaaatttctggttttttaagttgacaagttataactgttcatattaatagagatggtgtgatgttttaatatggtacacagtatggaataattaacttaagatagaagacatatctattgtcagggttctctagcagatcagaaatgatattataaaaaacaaaaatcaccctgagtgaggtaacccagacccagaaagataaatatggtatttgttcacttatatgtggatgttagccattaaataaatgataaccaacctacagcttatatgaccagagagtttaggtagagaggaagggcccagggcaggggggcacatggatctccctgagagggggtgatagaatagattttgatttttatagattaggtagggaatgggaggagaaatagggttgagggaggaaatttggggagagacagctagaatttgggggcatttaagggatgatatgaaaacccggtgcagtggaaaccctcctagaatatatgagggccatcctaatgaggtctcctaatcatggcagtaatggagtcaccattactggccatctcttgtccccaaatcaggcttccagttctgggaatggctttcatttcagtgagttgttgaccaagggagtcccatggaaaccctcaaatcacccctgggttgctaagacaatgggttgttctctgtaaacgttgctgaagacgacacccacacaactcaacgaacatggagaagtcaggctggtgcctacgtggagcctttaactgtatattccagtgtcttcagtgtgagcaggcaaccaaaagaggaatacaaacaccagcccagccacaaaacctttgacctacaatccatccctggggtaggcgtaggagtaaatggttttgcacggagtaaggattatccctgcgttatccaggggtcatttctctgtgctcacatcttgtttcaatccggacacggcgttgtagtgcttaggtcaagaatctccctactcaagtttgtgtaaacaattcttaccgtttattctctgccttgtcagtgggcagaggagagaatggcgtggaaagttccatcagccagaaaaggagagagagcgagcgagggagattcaagtcggccacggggagaaggtccgaggagacaccgtgggaagaaacatctgaagcggagggagccagaacaatattaacatatcatgggaccggagccgggaggtaaccagattagcataaggggttaaggtagatcattaaactgctgaggtattgccgtgacgcttgaaatacatcttggtttctctgtgtggttattggggactagcaaaggtaaagaaatacagctgctggtttaattcactgattacacttgtattaaaacgatacattttacagatagtatttaattttaaaggccacagacctttgtctttttctctcatactgatggacacttatcttgatcccgtgcctcctgctgtaataaatacgtgtgtattcagctcttctccacactgactttgtatcagtttccacacatacagaaagcgaggatcactggactttatgatagctcgatttttaacttttatttttatttttttgagtatgtgaacaatgggtgctctttcttccttccttccttccttccttccttccttccttccttccttcctccctccctccctccctccctccctccctccctccctccctccctccctccctctctctctctctctctttctttctttctttctttctttctttcttcctttctttcgaaacagagtctcactctgcaccccaggctggcatgggactcgaactcatgaagatttatatgtttctgcctctcaagtgctgtgattacaggagtgtgcctgcccatctgactttgtgtggtttcgacttttggacagctctgaataaagttttccaaaccaggcatagcgatttacatcttcatcagtgccatgctcggggttgctgtatttcccacatccttaccaatgtttggctcgtcgttttgccagcagtcactcccatggatgtgcagtggggctggtgttctactctgcgaacccatagccattagtgccagtggatactttcttcatagatttgctgaccatttatatatctttcttggaaatatacacgatcagatatcttgtttatgtttaacttttgttgagggaagggaaaggaagggtttattctgcttacatgtcttggttcatagttcatcacaaagggaagccaggacagaaacccaaagcagggaagtagggactgaagcagagatcatggaggaatgatgcttactggcttgttctccatggttttctcagcttggctttttcaacaatcaaggtccagctgtccaagggtggcgccttccacagtgacctgggccctcccacatcgatcatgaatcaataaagtattccacagacttgccaataagatagaggcatcttctcgattggagtttttctcttcccatgtggctctatgttgttccaagttaacagaaaatggaccctttgtcaaattgatgtgcagacacatcactgttaaaccataacctttcctttcttgcttatgcccaagttctcgtgttaataatattacattgtatattacattataaaatacagtcccaaaccaggctgtttcggtcggcccgcaacaactgttgagtcatttaaattgttcatgtgcttgaatatcaacctctcattggatatatgatttataaatattttctctctgttgctgtataggcctcagactgtaaatttaagtgtggccagcagagggctccattgtgcaaagaaggaccagtacttgggtgaagatggctctgcttaacatcaggctctttatccatacaggctcagcaacagagttaaccatgtatgggaatgggtccataggttacactgacccatttacctcaatggccaaaactggtagtgcccaacttttgagtaccttagtaaaggaattactctaaaattttctttctttctttctttctttctttctttctttctttctttctttctttctttcttccttccttccttccttccttccttcctttccctttttaacaatttttaaaatgttatattatttgctatttcctttcatacttatgtttaatcttgctcacacttttcattaatgggcaatattgtgactctacctcactgttttatttggtcttattttctttcttttctttctttctctctctctccctccctccctccctccctccctccctccctccctctttctttctttctttctttctttctttctttctttctttctttctttctttctttctttcttattagatattttctttatatacatttcaaatgttatcccgaaagttccctataccctccctccaccctgctcccctacccatccactcccacttcttggccctggcgttcccctgtactggggcatataaagtttgcaataccaaggggtctcttttcccagtgatggccgactaggacatcttctgctacatatgcagttagagatacgagctctgggggtactggttagttcatattgttgttccacctatagggatgcagaccccttcagctccttgggtgctttctccaggttctccattgggggccctgtgttccatcttatagatgactgtgagcatccacttctgtatttgccaggcactggcatagccttatatgagacagctataacagggtcccttcagcaaaatctttctggcatatgcaatagtgtttgggtttggtggctgattatgggatggatccccaggtagggtagtctctggatagtccatcctttcgtcttagctccaaactttgtctctgtaactcctttcatgggtattttgttccctattctaaggaggaatgaagtatccacccattggtcttccctcttcttgattttcttgtgttttccaaattgtatcttgggtgttctatgtttctgggctgtttttattttcatgttgcaagtgtttcatctgcatgtatataagtgcactgcttgtgtccaatatctatagaggccagaagagggtgccaaaatacctaaaactggagttacaggtggctgtgagctgtcatttactctctctcaatctctctctctctctctctctctctctctctctctctctctctctctctctctctgtgtgtgtgtgtgtgtgtaagagaacctggtttttctgtaagtggagggagtgctcttaactgctgagagccccctttctactgagacagatctcactgtatatctctggctagcctagaacttgctatgtagaccacatggccttgaactcatacagatccaccttctgagaataaaggccagtgcccctatatttggctttttcactggtctttaaaaattaagtagtcctgttttatttttttcttgtcttgtcttttctcttcttcctcttccaccacctcctcctcctcttctcccccctcttccttcttctgtttttttgggacagggtatctctgtgttgccctggctgtcttggaattcacaggccaggctcccgtttgtatttatttccttctcacatctatctaattttgttttttaaaagttttttcattatttgggttttctttttattaaatgttttttaattgaaatagaattgtatcacttctccctcccttttctctctcaagctcatctcagtcacccgccctgaacgcttcccaggcttctcaccttccaattgatatcctctttatctttgactatactcatcacacacaggcacacacatacccaaaatatatacatgtgtatgtacaaatatgtgagtcatgtggtcacccatggattccagtcaaaccagcaattgttggcccattaaaatgtattatttataagggccaactgttatttggatgtatagctataagtcattaaaggaatcagataatttgtttataagtctattgttttcagataaagcagagctagtaaaatttgttagagtccagtcccccctctctctctataatatataacatatataatacataaatatatagtgctgagttaatctgttgattgggtgatagatatggcttcaggggtgaccactgtgttggacaaacaataagagggctcattcacaagagaggctaattcttcttctccccgcagactagagtagcttgtggttctttctttaagggtgggacttcacacagtttttcttctcctacattaacatgccgatcgacattgctattgttctggtcttgtttctgtagccattttaggagaggctgtttcacttcagacttcctcctactctggctcttacaatttttgcactctttcctctggcatggtaccctgagctacggatgagggagctgtggtaccaatgtatttttggggtgctgggatctttatactgtgggtctctgctttgtgtccagttgtggttttctgggatggtctctgtttgctgtagagagaggcttatctgatgagaggtggtagctacactgatctctgggtataagaacaagatgcagagaaattatgctggcctagcaaagcagtggtagtagattcttttcctttttatttattatttaattttattttaagatttattgaagcctgataaacagcttcaatgaagtagctggatataaaattaactcaaacaagtcaatggcctttctgtacacaaaggataaacaggctgagaaagaaattagggaaacaacacccttttcaatagtcacaaataatataaaataccttggtgtgactctaactaaggaagtgaaagatctgtatgataagaacttcaagtctctgaagaaagaaattaaagaagatctcagaagatggaaagatctcccatgttcatggattggcaggatcaatatagtaaaaatggctatcttgccaaaagcaatctacagattcaatgcaatccccatcaaaattccaactcaattcttcaacgaattagaaagggcaatcggcagattcatctggaataataaaaaacctaggatagcaaaaactcttctcaaggataaaagaacctctggtggaatcaccatgcctgacctaaagctgtactacagagcaattgtgataaaaactgcatggcactggtatagcgacagacaagtagaccaatggaatagaattgaagacccagagatgaacccacacacctatggtcacttgatctttgacaagggagctaaaaccatccagtgtaaaaaagacagcattttcaacaaatggtgctggcacaactggcggttatcatgtagaagaatgcgaattgatccattcctatctccttgtactaaggttaaatctaagtggattaaggaacttcacataaaaccagagacactgaaacttatagaggagaaagtagggaacagccttgaagatatgggcacaggggaaaaattcctgaatagaacaacaatggcttgtgctgtaagatcaagaatcgacaaatgggacctcataaagttgcaaagcttctgcaaggcaaaagacaccgtcaataagacaaaaagaccaccaacagattgggaaaggatctttacctatcctaaatcagataggggattatatccaatatatataaagaactcaagaaggtggacttcagaaaatcaaataaccccattaataaatggggctcagagctgaacaaagaattctcacctgaggaataccgaatggcagagatgcacctgaaaaaatgttcaacatctttaatcatcagggaaatgcaaatcaaaacaaccctgagattccacctcataccagtcagaatggctaagatcaaaaattcaggtgacagcagatgctggcgaggatgtggagaaagaggaaaactcctctattgttggtgggattgcaagcttgtacacccactctggaaatcagtctggtggttcctcagaaaattggacatagtactactggaggatcccgcaatacctctcctgggcatatatccagaagatattccaaccggtaagaaggacacatgctccactatgttcatagcagcctcatttataatagccagaagctggaaagaacccagatgcccctcaacagaggaatggatatagaaaatgtggtacatttacacaatgtactcagctattaaaaagaatgacttatgaaattcttagccaaatggatggacctggagggcatcatcctgagtgaggtaacccaatcacaaaggaactcacacaatttgtactcactgataaatggatattagcccagaaacttaggatacccaagatataagatacaatttgctaaacgcatgatactcaagaagaacgaagaccaaagtgtggacactttgccccttcttagaattggaaacaaaacacacatggaaggagttacagagacaaagtttggagctgtgacgaaaggatggaccatctagaaactgccatatccggggatccatcccataatcagcttccaaacactgacaccattgcatacactagcaagattttgctgaaagggccctgatatagctgtctcttgtgagactatgccgaggcctaggaaacacagaagtggatgctcacagtcagctattggatggatcacagggcccccaatggaggagctagagaaagtacccaaggagttaaagggatctgcaaccctataggtggaacaacattatgaactaaccagtaccccggagctcttgactctagctgcatatgtatcaaaagatggcctagtcgccatcactggaaagaaaggcccattggacttgcaaactttatatgccccagtacaggggaacgccagggccaaaaagtgggagt

SEQ ID NO: 1375 - DNA, 1079 bp, Mus musculus
gggatgccaaacccctacctaaccagaagaagagaagaaaggccactgccgaggtcacttccagtacttggaggagaaagcaacgttcccatttacagctgagtaacaggagccacaaggtatgtctgactcaaaagttcaggctctcgatgactgtgcggtgctgcccagtgtgtcttcttcaatgtaacctcaggacctagaacagcaccttgcatgtgctctcaggtggttactctgatggcctcatggtcctgcctgaaacagaaagtctgccacctacttctgtagcagcaagactcctgttctgtggctaagcttcctgcctgtgcaagagccacagggaggggccaaatgcatgccactggggccacgcctcctggtaaagacataaatagtgatcctcgggactggtcatcagagctcccctgccttcaccatgaagtcctgcggccttttacctttcacggtgctccttgctctggggatcctggcaccctggactgtggaaggaggcaaaaatgatgctatcaaaatcggagcctgccctgctaaaaagcctgcccagtgccttaagcttgagaagccacaatgccgtactgactgggagtgcccgggaaagcagaggtgctgccaagatgcttgcggttccaagtgcgtgaatcctgttcccattcgcaaaccagtgtggaggaagcctgggaggtgcgtcaaaactcaggcaagatgtatgatgcttaaccctcccaatgtctgccagagggacgggcagtgtgacggcaaatacaagtgctgtgagggtatatgtgggaaagtctgcctgcccccgatgtgagcctgatccctgacattggcgccggctctggactcgtgctcggtgtgctctggaaactacttccctgctcccaggcgtccctgctccgggttccatggctcccggctccctgtatcccaggcttggatcctgtggaccagggttactgttttaccactaacatctccttttggctcagcattcaccgatctttagggaaatgctgttggagagcaaataaataaacgcattcatttctctatgc

SEQ ID NO: 1376 - protein, 146 aa, Mus musculus
IVILGTGHQSSPAFTMKSCGLLPFTVLLALGILAPWTVEGGKNDAIKIGACPAKKPAQCLKLEKPQCRTDWECPGKQRCCQDACGSKCVNPVPIRKPVWRKPGRCVKTQARCMMLNPPNVCQRDGQCDGKYKCCEGICGKVCLPPM

SEQ ID NO: 1377 - DNA, 22328 bp, Homo sapiens
ttcaaccgccacagaggccatgttctttttttaatatgtcttatcaaggcccacaacttccttagtgacaagtcatggcttcttttttgttggtccttgagtaaatggatgtctccctttggggagatatgccagcccgtgggggaaaaatgtgagaaacatcttggtcttcaatccgacactgtcacaaatcatttcttgggaggggaggtttcgaatgctcctgccaccactgaattttcttggcttctacttctggttcagacatttgctgctgttgccccagatcccagctctccccatccatgagttctctaactcttctttgtactgtttttttctgagggcaaccacctttctcagtctctccagaattgctaagaagaatccaacctgcacaaatggcaaaattcgagccaagggaattcaagccttctggtaaaagaaggaggtggacacccagcctctcccttgaagtgcattgctgctcttagaccaacagggatgactggacatgctgcccctcccatgtttttattcctttctcagcttctccttgccctgtctccacaagtgattttttttcttttaaatttttatttttttcttttatttttctttagagatggggtctcgctattttgcccaggctggtcttgaaatactgggctcaaacgatcctcccaccttggcctcccaaagtgctaggattacagacaccagaatagagatataattgcctccattttctatgggaaaatcttaaggcacactctaggtttgcaaatcatgctaattcctttccagcatgcaccaatttataacttgtatgtcttattttgtaggggatgaccttggttagctgtctaattgaggaagaccttaaacataaatgcacatagaggcattgctgattgataatttgatttatgttcatgggaggaaaaacaacatcaaacaagagagctatggttaggtgcttattgtttattgatgctaagtctctttctatgtcttttaaaacaagcaatgaggctgaattttcagagaatgcagatacctaacaattggcctaagggttgtcctgcctaatttggtaaaaaagtggcagacaactgtacattatttagatttaccagatgaacatataaaaaaaaccaagtagaaatactggaaataaatgattattgaaataaaaattcattacttactagatagaactagcattcgacccagcaatctcattactggatatatacccaaacgaatagaaattgttctaccatgaagacacatgcgtgcatatattcattgcagcagtattcaaaatagcaaagacatggaattaatctagatgcccatcaatggtggactggataaagaaactgtgatacataaacaccatggaatactatgcaggcataagaaagaatgaaataatgtcctttgtagcaacatggatggagccggaggccattatcctaagtgaattaaagcagcaacagaaaaaccaaaaacagagtatcacatcatctcacttataagtgtgagctaaacactgaatacacgtggacacaaagaagagaacaataggcattggggcttacttgagagtgaagggttcgaggagggttaggactgaaagagtacctattgggtattacctgggtgacaaagttatctgtacatcaaatattaacatgcaatttacccatgttaacaagctgcacatgtacccttgaacctaaaataaaagttggaaaaacattggataaagtagagtttagactggatgcagctgaaagaaaacttggtgaatttttagccagtactgagaaattcacccagagcccagcacagagagatgaagagaaaaatataagagaaaggcaaaacaacgataataaaaatagaaggtctagtaaatatccggtggaagttccagaaagagactggagagaatggcacagaagtaatattcaaagagataaagaaaggactttttcttttaggattaaattaagacatgcatcttcagactaaaagtgcatatttggagtaaagcagaataaataaaaggcaaacatgactcggcgagatttctgacaatagttactagttcatgcttttatatgaagcaaatggaccaggagccaactaaacatgaaaaccaagcctcataatggccactgattgttcatgtcgatccccacatcctgctgcacctatataaagtgaattcttgaaaaggtgcagatgcccttccttccccaacaaaagggcatcctctgcaatactcctccaagatgtagccatggaaggtgacaggcaaaggagaggctcccagacagcagaactggattcttcagatttattgagtaaggaaatcactccaacattaggtaggaagtcctcacatccctgtcttacaggatgtacaatccgtattacgggccagtgacaatttgtatatatcttcctatatttcccttttgcaaataggactttttattgcagtcattccgccctcaatctaccattctatattgggtgcatttgaagtggttaaatttacttaagcttattaaacttaatctgtgaagactataaatttaactgacagaactgctttcacccacattgcagaactggagatgaatatagtacccagagagacattttgttgtctttctttgggagagaggttgagtgcattttatgtagatgttggtttagaaagtatttgaaaaaatttagttatgtagatttcagtaaccaaaaggggtatactttagagaacactcactgctatttttaccactgagcatcctttcacccttctgctggtagctatatcctaatttaccccaggagaatcattccctctcccactctgaaaattccactggatttggggatgagtacacatggtgatgagtattgtggccttggcttaaaccaatcggtacatcccagttccctggtcccaatcattggtttaaagatttaattctagccactcctagttagttgagttgcccagaaaaagcccttactagacatgaatttgggaagatgggaggagatgccacagccatattataaatgctaagagggagcctgactaagaatgaagccaacatgaagagaagtgccgtggagagaatcttgtgggagctatagtttgagcccttgctcaaattgcacctgaaaatagcacctattctccttggtttattcagcactctcacttcttgcatctttaagatcattttttaactttccgccgaaggattatctggacagtgctactatcccaggcatctccaactctgggtttaggactaaagaagtcttggagggaccataatgaagcagtatgtggctgaattctgaagacttgggtttgaatcttactgtacctctgacttgctgtgtcatcttgggcaagtgggcttactctctgaggttccatttccttttctttaaaatgggatataaaagtgcttggtccactgtgaagttcggggtcatgcatggtgtctattcctaggctttttattcaggaaagttggctctctgggtcctgagagtcctctataaggcaaaaacccagctagaatctaagacttggggcctctaaagagcatctgttccaatgcactgatcttacaaatagggaaactgaggcccagagaaaggaaggttctacatcaaattggacagagctgggattccagcccagtgtcctgagtccagtatcatcgtcatgcctctctagctgaccacagggtcccagaggccagaagtgatgctatcaagtgtgagtctttcatggtctttctggcactctgctctgtttgggccacagaggtgtcctcatagtggtgctctccactgaccccaggcttagacaccaaactctcccatagtaatgatcaaccaggcatcgtctgccatgtccatctaagaccctaccatctcctgatctgcaacaggaacgtttctctgagactcactttttctcatctgtaaactgacttgacattagtatctaccaagttttgtgtgacgcttaaatgtaacaaaacatgctaaaccaaaggagatggattctagtgatttggggacatcttttcccaagctgcttatagctctgttccacagtttaataatccagtttttctattcccggttttcttccatgggtagtcatgatggcagtttcttaatgccgagcactgtttttctttttgttttaccaggtccctaaagcatttcctcatgacataccacagactttgtttctttaaccttaggttaactggatcccttcctctagggagacagacatgcagtttttgaaggaataaagtgcagagccctgatctgtacaccaaccatctcttgcatggtaataagtatgaagacacctgagatccaccgttgttggttaatttctcctgccaattctttgatggtggatgtttttcacccttgcccagattctgctttactgcccttcacccattcacttgtgggcctaaaaggacagttcatatttccagattttattaggactatgatgagcagtaggggaggaagtacaaacattgcagaattcaaactttcttgggtgggaaaatgataaggagtggctaagccatctgtttctctggaaggtctagggagatccagttgccatgtccaccacctgtggatgacacttccagaggtgatttaaatgaccccacctcccttgcagtcatctctttctcatctactcttcctgtctcagctcggggtttttttttccccaatactctccccaccacacctactacatctccatactccctggctctgtgtctccattcccatttggtcattattgacgttttatgtattttgtttaagacaatattttaagctaagttataaaggcaactatgaaagtcagaaaattggctgaggctcttggggagagctgatggcctcagaggaagcaggatgaagctgtttcttagagtcacagttaccgtcttgggacaggtagaggaactgaggcccagggaaaggtagttgctgccttattcacataggaatgagctgtgaaaacctggttgtctgccagattctgaaagagttttttgttctgtgttgttttttggttttgagacttggaaacatagtgaattttaggtaagaacacagtgacttttagttaagggtgaagctggcatctgctatcagaatggggcgacccgaaacacattcttccttagacctgagcaacggggctccttccctgcacctcacacttcaggtcgctctgtgccttggggcgtcttcctcaaaattgtctatgttcccctggagtgcctgaagccagccaggatcaatggtgccatggggcagagaatcccagcttggactgagaactgcatgggttctagtccaagggggtgcttctcactctgtactccttcccccattgctagaatctagggcagtcatcctaccaccttggatggctcctggcaggagcctgtggctgctcctgtctcttcctcagggctttccaggccatctctgtgcaactccaaaggggcttttcagttgatgtctttttttttttcctctgattgacctatgctctctcgggtcagtgttgagccataatggattaggcagagacatttcttgtgcaaatgagatgctcctctcacttcaaccctgagcccctccagggctggctacataatttacaagactcaatgcaaagtgaaaatgtggagctgcttgttcaaaagcaggaaaaaaagtgttaacggtactaaaattaattttttaactttctttggcagtttctctctagatctgccatggtgttaaaaaaattatttactgttgctcctccacaagtatgtggatactcacagggagagtgcagactcccagaggtgcgcagggtccctgtcccgctacttggtgtgtgcaggacccaccagctgccagggtccccctgtcaccagcaccctggtagtcagggacaagcggccacactaacaacatttgagacagtaattggaagccagtattcagagaaggcataaaggatgatgcagcctcacaagtaatgatgtaaccaactttaataaatggcattgggaagtgcagaggcaagcaggttccatcagccagggttttccagagaaacagaaccaatagttgattatctggctatctatctatctatctatctatctatctatctatatctatctatctatctatatctatctgtcagttaagatctgtctatctgtctgtctacctacctaccaataggcccaatcaggtctattttgtcaagaaataagaccatgttttgtcaaacatttaatgggacagagccagatgggtccagacccaaggactaagctatttagttaaagactgacagctccctgtgcgcttaatgtgtgcagggacacgccggtaataaaaacaatgtgtaatgtactgaggggaccagacagtttgctgagtgctttccaaatactcctcacaacaactgtacgactccagaggcagcaacactctcatttttcagtggaggtagctgaagttcaaagaggttcagtgatttgcttccaacctgtaagtctgactttgaagttcaggttcttaacaaccatgtggtgtcgactccgtgggcgtgctcttttctgtagccctaggcctagtgcaatacctgacatgtggtaagaaatgttaaacaacttttgtgtgaatggtttgtataaatgaatgaaggaatctataggatttaggtagaaggcaataaagggtgtgtgaaatagatttttttttttgagacagagtgtcactcttgtagcccagtggcatgacctcagctaactgcaactctgcctcccaggttgaagtgattctcctgcttcagcctcctgagtattacaggcacacaccaccatgcccggctgatttttgtatttttagtagagatgggatttcaccatgttggccaggctggtctcaaactcctgacctcaagtgatccacccacctcagtctcccaaagttctgggatcacaggagtgagccaccactcccagccttgagatagattgaatgagtcagtctcaggttaagatttggttaggagtggaagtgtcctccaccagacaggttctggggatcagcatgtgagtaacctgttttagaaaagctcaatcttgtgtgtgtcgttaatccgctatgcagctttgggcctggatcttcttctaagggattcagtctcttttatgcaagctgtgggtttggtctaggggttagcattttctgtaaaggaccagacgataagtattttaggctgtgcagtaaatattttaggtccctgttgccattgtagtggaaagatagccttagacaatacataaattaatggatgtgtggctatgtgccaataaaactttatgaaaacaggtaactaggtggatttggtccaaggactgtagtttgctgatctagaaaacccttgaagtcctctttttagtcttaacattctatgatgtaaacatttagaaccaattatgtcaaagataataatgattatatactattatcttcttatgacacccatggaagacattgctaattgggcacagggctcttttctgatgagaaaggagctggctctaatcagtcaatcacagattgagcaatcagtcaatcacagatttaaaaaaaacttaagctgtagcattttccttttaatttttttttttttttgagacggagtctcagtttgttgcctaggctagaatgcaatggtacaatctcagctcactgcaacctctacctccagggttcaagtgattctcctgcctcagcctcctgagtagctgggattacaggtgtgtgccacactgcctggctaatttttgtatttttagtggagatagggtttcaccatgttggccaggctgctcttgaacccctgacctcaagtgatccgcccaccttggtttcccaaagtgctaggattacaggcataagccaccgtgcccagccccttttcattctttaagaaataaatatttagaaaactccagataatttcttgagtgtggcactgaggaaaataggaacaaacagagagagagagagagagagagaacaggaactctgtgagagaaatcaaattatcccctgggtggtggaagtgagaacaaaaatcttgacctgagagtgtcattacccattggtggaaatcatagcctccatttctctcttacctaccctactaagtactccaactaagagtgaatgcacctggctcatagtagttaccttgtgcatattaattttcttccttttctttttccaccaaaatttgactgatgattgattatgtccaagtcttctgatccaccaaaattcaaaccatggagtgacttttgtataaagggatctgctgccagttgcctgtttggttgtggaatacttaaatacttcatgtggggccatcgctacttgataatgagtgggtctttcatgtctgtggaaagttccacaaaccttcaccttaggaatgaatgggagaattccaagcatgaagataatgagtcaagagcttggagtttgtagctagatgagctttggttgaattttattttattttatttttttaagacagggtatcgctctgtcccccaagctggaatgcagtggcacaatcatggctcactgcagcctcaaactcctgggctaaagcgatcctcctggctcagcctcccaagtagctgggactacaggcatacgtacgtcatcatgcctggctaattttttacatttttttgtagagatggggtctcaatatgtggccagggctggtctcaaactcctactctcaaggaatccatacacctcagcctcctgggcagctgagacagcaagtgtgcgaccctacactcagctatgggctgaattttagagataatggtcgctctctttataattagaagcaacctatgcagactgggtagcaaatagaatgggtttaattttttgctgtcatgtgagatctgtaagggattttggggaattttaggaagcaatcctctaagatctcaaattatctcacagctaaatgtagattacagtgactgatgagctgctttccccctttatctcagattcatttcaattctctttagtgggaagggatactattcatttgttcttttcattcagagtcccttcatgcccttaatttcataaccctctgagaagggctgacttgttagtatcatttcatttcacagctgagacaactgagctccagagagatttgtggagagcggagctcttcttcagctttcatttgtgagtgcttttcctgtgtcaggcacagaacaggcactggggatataacggtgtaaatatttcagggaactaagtatcagttggttgaacgagctgaacttttgagaaagaaactgcattgagtaatcagcagagtttcacaatgcctgagagtccagtaatgtgagaatcagaattagcaatgtgagaatagaatgtattgcacaaagtctcagcagggagtctgtgtctggttttagttccaggtccgggtagcacctttgcaattgaccacttcttccctctctccacctataaggctaatggcctgggatcttgtgatgtttagggctcagatggacactgagatggcctctttaatcaaccaacttcccaggccaatctcttccctttcttttctgatagttgctgtgttggcctcatagccttacctggcataggaaagataaacaatctccttggtgtcaggatttctggtctctggctacgtttcctgcttatgcaatagtagctgggagaggccgaaagaattctggtggggccacacccactggtgaaagaataaatagtgaggtttggcattggccatcagagtcactcctgccttcaccatgaagtccagcggcctcttccccttcctggtgctgcttgccctgggaactctggcaccttgggctgtggaaggctctggaaagtgtaagttggagtcactctggtctaatctgggctgcagggtcagaggtggggtctccttgtggtgtgggtgtgtccccttctgtaggctctgatccctcagcttagtttcgggagacctccctgagggtggaatacatgtctggctgagctccaaggtttgtgtgacagtttgagcttctggaaatgcttcctctatgcagccatgctgtcagcccaggtcccactctctctctctctctctctctctctctctctctctcatactccgccttcttcttcacctgtctgcgactctcaaatcattagtttctgactctgcttccttgtgtctttgcttctgctattttgtctctgtgcttctgccttgggctttagctctcaacttctctcacactggttctatttatctttgtttacctctctccatctccatcactcccagccttcctctctgcctttgtgtagccttgttttgctcttgggtgggaggtcttgactagaagcctgctgcccttttcttgggtgtgaaacgtcccctgtccatttgtctaatttaatcaagcccatcaatacacctggagatcaggcaggcatgaccctttgggctttgtggacagctactgaggtaagggtctctccccctcaaaagtggtgctttgttcaggaggcatgatgggtcctcagtacccagcctcctcctgacctcttgactttctcttcaaaagccttcaaagctggagtctgtcctcctaagaaatctgcccagtgccttagatacaagaaacctgagtgccagagtgactggcagtgtccagggaagaagagatgttgtcctgacacttgtggcatcaaatgcctggatcctgttgacaccccaaacccaagtaagcaggtcggggaactgggtagagaggagtgagcctggggacacagcattagagggatggaactgggtgatgggtcctgccaggcctccttgtcaatccgtcagtgagtcacactgccctaagcaggaaggtagccagcagctggtgaagcagcgggcatttagatagccaggtagttggaagcctcccacctagtcagcactgggtggctggccacctgcatcaatggggggcctgaagttctaggagagccaggtgctatgtttgggggccgccttagggagaaggtggtggtgatagaggtggggaggggatgatcccccctgctgaagctggagcaggggctcactctaaaaagtggggatgggaggggttgtataaagtacaaggcctctgaccggtagcctcactctcacccagcaaggaggaagcctgggaagtgcccagtgacttatggccaatgtttgatgcttaacccccccaatttctgtgagatggatggccagtgcaagcgtgacttgaagtgttgcatgggcatgtgtgggaaatcctgcgtttcccctgtgaaaggtaagcaggggatgagggcacactgagctccctccagccctctcagcctcaaccctctggaggcccaggcatatgggcagggggactcctgaaccctactccaagcacagcctctgtctgactcccttgtccttcaagagaactgttctccaggtctcagggccaggatttccataggatcgcctgtggctttgattctattctagtgtctctgggtgggggtcctgggcaagtgtctttctgagtctcagtttctttatcggtaaaatgtacataatgagattgaaagtgctctgcaaagcactatgtgcactaagaatttattattcaggttgtttccatcatgttttctgaggtgaaatcacaaaggatcagtggagtttgaggattatctagttcaatgctttgagtttagagttttacggtgaaaatgagacttgtctcctgacactaagtctctctcaactatagcgctatcttgctattttctctatctcagaaggatccttgggcaggaggaaggatgtggatatgatttggctggtttctatgctgaagctcttatctgattttctctcacagcttgattcctgccatatggaggaggctctggagtcctgctctgtgtggtccaggtcctttccaccctgagacttggctccaccactgatatcctcctttggggaaaggcttggcacacagcaggctttcaagaagtgccagttgatcaatgaataaataaacgagcctatttctctttgcacatcctgcttctgtgattcgttgggggtatgagtggggtgggaagctgtgagggaagatctagatatgaggcctccttcctatgaatacgtagtgggaggaagaggcttagggactgggggaacttgaatttatatcatgagtgtgaaagtgctgactctgtgatttgggacaagtgattttatctcctaaatttcaatgggattagggatgtacaataacatgaagaatcagaaacctcaattttactgcctctggcaggattgtcaactgcaggtgaaaaactttcctgagacgagtttatgcataagagatcctgccaacagttaagctattttaatccagggggttttcatctaaagccatacagaactgttggggcagattcctgtgttcacctctgtatgtgttacgatatatatattggttttcacacttgatatgttgtaggtctgtctgttgtctaatccaaccaacactctctggacactcagaaaaattaagattatctgcaactcacagcaaatggagtcctcaaaaagactaaccatgttacgtcagtgcccactctcgattattttgaaagacttggaatgccccaaacctcactggaccattctgctacatacttttctcacctccagcaagggttattccagactgaggaacctaggctcgggcaaatacgctactaggagtgtgccccaagtagcaccttgcagggggaggagacctagcgttgaaatgagataaactcctgggttacatacagaacacatgctgaaaaagtgacagtactattttttttctactcttcttctccaatttttggataatgataaacttttataatcttccttaggtcaggttttctggaaaacagtcccagaggcaaatgtttgtgaacagggggtttgctggggagtgtcctggggagtgacacctgtgacagggaaaagaaagcagggctgacaggcaaaaaaagcaaaaatagacaagtgggactacctcaaactaaaaagcttgcaaagctaaagacacagccaccactaccggtctctgcatcttgatggtagtggtcccctgggcccagctgctttctctttatctcttggtcttgtgtcttttacaatctcttgtctctgcacacagggagaacacccactaagccctgtagggctgtatagaaatgctactgatttttgtatgttgatgctgtatcctgcatatttactgaattcattgattggttctaagagtttatttgcagagtctaaaggttcttctgtagatataattatgttatctgcaaagagggataattagacttcttttccaatttgaaaggcttttatttctttctctttcctaattgctctatgacttctaatattaagttgaataagagcagtgagagttggcatgcttttcttgttccagttcagtatgatgttagctgtgggtttgtctatatggcctttattgggttgagatacttttcttctatacctactttattgagagtccttatcatgaagggatattgaattttaccaaatgatttttctgcatctattgagataatcatatggactttttgtccttcattctgttgatgtgatgtatcacatttatttaaaacattcataaatgatttatatatgttgaaacacattcttcatccctggaataaatcctacttgattatagtgtattatctttttaatgtcttgttgggttcagtttgctagtattttattgaggatttttgtatctatgttcataaggaatattggcctgtagttttttggtgtgtgtgtgcatgtgtgtgtccacgtgcccttatttagttttggtatcagggtaatgttggactcatagaatgagtttgggagaattttctcctttctcctccttaattttttggaatagtttaaagaagaactgatgttaactcttctttaaaagtttggtagaactcagcagtgaagtcttccattcctgggattttgttgttgttgttaggaagctttttattactgattcagtctcattactcattattgaactgctcatggtttctaaatttttttctggttcaatctttataggttatacatttctaagaatttatcagtttcctctaggttttccaatttgttagcttatagttgctcataatagtatctaagaatcctttgtatttctgtgtcaccagtggtaatgtctgctttttcatttctgattttatttgagtcttctctctttttttccctaggtggtctagtttatggtttgccagttttgtgtatcttttcagaaatccaactttttgttttgttgatcttttgtaatttttagtctctctcttgtgtatttctgctctgatctttattatttctttctttctactaattttgggtttggcttgtttgtgcttttccagttccttgagatgcatcattaggttgtttatttgaaacctttctagttttttaatgtagacatttattgctataaactcgcctcttaatactgcttttgctgggtctcataggttttggtatgttgtgtttatatttttgattatttcaaggaattttgaaattgtattcttaatttctttcttcacccattatcattcaggtgcatgttgtttaatttccatgtatttgtatacttttaaatgttcctattgttattgctttctagttttattccattatggtcagataaaatacttggtatgattttgatttgttaaaattcttgagacttgttttgtaccctatggctaacttttgacattgttacttgtgctgatggaatacgtattctgcagttatttggtgaaatgtgctgtaaatgtctgttaggtctgcttagtctatgatgcagtttatatctgatatttctttgttgattttctgttaaaataatctttccaatgctgacagtagggtgttgaagtccctaactattattgtattggggtctatatattccttaatatctaataatatttactttatatatctggacgctccactgttgagtgcatacatatttacaattgttatattcttttactaaattagtccctttataattatataatgctattccttgtctcttttttccagtttctaatttgaagtctgttttgtctgatataaatatagctactcctgcttgcttttgatttgttttcatggaatatttttccttctctttactttcaccctatgtatgtctttacaggtgaggttagttttcactatatagttgggtcttgttttttaatccttttagccagtctatatttttaaaatggggaatttaatctgtttatattcagggttattactgacaggtgagtacttactcctatcatttgattgattgtttcctggttgtttttgtatatcctttgctctttacttcccttcttattgtttatttttgtggttgggtggttttctgtaataataaggtttgattcctttctctttcttccttgtgttttggttctatcagtgagttttatagtttcaaatgctttcatgatggtgtcaattcatggtgcaccatgggactgaaatttaagttttataatgaatgcttttttccttaattcctgcttttatgtcttcatgactgtgtaaaaacttcattagttgatggattcaaaagactaacttgaagtcattttggaatgtgaatctgggccagataaaccttcatgtcctctctacactattctaaaaatggatgttcctcctgcttgcttggtagctaaaaacatatctgacttcagcaatagtaagaagtagatttattaatgcacacagaagaattgggacctgatgtgggaggcagagagatgatgagggaaagctctctggagtagctgctctatttaccaacaccgacctttctttctagcacaaacttggggctacctccacacgttgagtgttttccctgtgtaaatctgctgttttcttctaactctgaattggcatgtcctcactgagtttcagtccaaatttacaaaaacaaaatccctcccaactgatttaatatgcctgcactcatattttcaagtgcctgcactcatatttaaagtgtctgtactttaaatatttaaagtgtctgcactcatattttcaagatgtttgtttgcaaccccacacactgacctttctgtttccaaactaatttgatatgcactgcaattctgtgataccgaaacatgagaaggatattacatgaaaggaaaacaattttccagccttgctataaacataaaggcaaaaatcctaaacaaaactttacacagggaatttggtcatatataaaaatgatgaaacatcatacacaagtaaggttttatgtcaacaatttatgattggtgtaacatttaaaagtaaatcaatgggatacttctcattaatggagtacaggggaaaatgttatgattatcttcgtattggctatagaatgtgtgaaagagtcacttatctcttcatgataaatgagaaaataatgacagaacattagaagttcacttatttgatggcaagcctatacaaaaaccatacagcagagggaactactttcacaacggtggagtaaaatctgctccttcataaaaggagggagaataagtttaagaatccattattcaaaattcttaggaccagaaatttttcaaattttggatattttcacattttgtaatctttgcatataaataatgagatatcttagggatgagaggcaagtgtaaacattatctgtgtttcacatataccttatacacataggctgaaggtaattttatgcaatatttttaccggtttcctgcatgaaacaaagtttgtatacactgaaacatcagaaagaaagttgtccctatctcagccgcccatgtggacaatctgtgattgtttagtatcaccattgtatctgactcgaatttatatgctaccaataagcaatcattttattacacttattcacccataaatatttaacaataaaaatacgacataccattaatactgtgaaaataatgtgttcagggtaactaagcagcacagtagcatcaccaaaatacctgccccagctgttaaacaacagcaagaagcaacagcagcaggatttcagtctccatctacgatgctgtgttttgattaaacgattattggtcactgtattttatttttgtaggtgaaaagagacatcacaagcaattgagggaccaggaagtggatcctctagagatgaggaggcattctgctggatgacttttaaaaatgttttctccagagtcatctctctcattaacaatgttttttgtcttagaaatttcttgttgatttttaaacttacatgatttcttgttttggtatgaatacaggctgcttcagtccttcaataagcccatcacactttttcaccatgtcatctatcagcactttttctgcagtgttacgaacatcagcttcatcactgtcagcctgcgttttgcctgcaacccatcaaatgaggtcaggagaggagttttccacttttggcttcatgttggtgctcaaaacttttaggattttggagcatttcagatttcagatttctgggtagagatgctcaacctgtactcacatatattttcaatatcaactttttttccccagaattttggaattcagccaaaggtttgtcacaatccaaggagtggcatcattaagaatcatcaagaaaaacaagaaaactttagcaagaacagaaagtttagtggcagtataacttttccattcccatctttgtgcccagctgtgtggtagcctgaaagccaccaggtttgctccacagtggctgtgaaaaccagcagcccagcagcccctgcacgggaggatttcctttctgctttcgaaagctctgtccccggaaaactgtcactatttcatttgtatgtcagctctctaaaaaggcacccttttcatagcatgtatttacctcgtctaactcagagtgtgctctatgtggacagtgctatttctggggcaattttttgccatcacagctacttccgacggtgaggccaattggagctaacaagaggctgaccaaaaaacaaaaaaggaaaaggtaggaaagatttccaggtgcttaaagaaaatctctgtcacatctgtgggactttagaataccacactcctgcacagaattgtgtgtttgccccagggctgtgtacatgctaaggaaagacctcagatgaccctaattgttcacctctggctgaattaaagtctctatgtgaacaggaggtgaaatacaacataaagttgcaagtttcccagtggaatgttgacagtgtatctcaatggatacacatgcagccccttggaaaagtccaggtgatttattggtttagtatttaagatcatttctgtccaatcatgagctgacctctaagctaatggaacagcgtctttagtggctacacatgacacacgatacagactttagcaaattagtccaggaaagttactaaggaagtaatcaacagcaaagactgtgcaaacaaaccctggggagagaatctgatttccaaactggccacattatattatgtaaaaagtccaatttcattaaagaattacgagacatgcaaagaaacaaaaaatattgcccatacagagaagggaagggaaacaatgaacagagatgatcctttaggagctcagatgatggattagtagacaaagacatcagctattataaatacactgaaataactaaaggaaactctggacaaaagactaaaggaatgtatgagaataatgtcttacaacatagaaagaattaaagataagtaatgaagttgtaaagtacaaccaatgaaatagaaattcaaaacaggggttcaccagaagacagaaacagaagaaaggatcggctaacttaattacaggtcatttgagattatacactctaaggaacaataaagaaaataattaagaaaaatgaacagagcctcagagacctgaagaacacaatctagtgtaaaaacatatgcataatgggaatctcaggagagagaagaaagagaaaggcgcagaaagaatatatgaagatagaatgacgacgaaaatttttattttgattaaaaacattaatctctacatctaagaagctcaaagaacactaagtaggaaaatctctaagagatccacacctagatcgaaatattagtgacaaaggcaaggagaaaattttgaaagcaagggacaagccacttatcatgagcagttaataaactaaacagtaatttttcattaaaatcatgaaagccagaaggtagtgagagaacacattaaaaacggcagaagaaaaacctatcaaccaaggattctatatcttggtatgtctattcttcagaagtcagggaaaaattaaggcattcctggatatacaaaaactgaagagttcatcaccatcaacctgactgcaagaaatactgacatgatgatatatatatatacacgcatatatatgtatatatatatacacgcatatatatgtatatatatatacacgcatatatatgtatatatatatatacacgcatatatatgtatatatatacacgcatatatgtacatgtatatatatatatatacacacatacatacacagaaaatccttaagaatccctcaaaatattattagagctaataaatgacctcagcaaggttcaggacataatgtcaaaatacaacactctatggttttaagaataaaatttcatttacaatagcataaaaagaataggataattagggattcatttaaccaaaaaatggagaaacttttatactgaaaatggaaaattatttttcaaggaaataaaagaagacccccaaaatagaaagctatactgtgttcatggattggaaaactcgatgttgccaagctggtaattcttcacaaattgatctataaattcaatgcaatccctagaaaacttcaggtgaatttttgttgaaatagatcagtgaatcccaaaatttgtatacaaatgcaagggacccagaatagccaaaacagtcttaaaaaaaagggcagaattggaggactcacatttttttatttcaacgtgtactacaaatctacaatttcaagatgttgtgttactagcataaggataaacacaatatatcaaaggaatagaattgagaatccataaataagccattacattttaaattgtcttattttcaacaaaggtacaaaaactatccagtggggatagagtagtcttttcaacaaataatggggaaaaactggatatgcacctgcaaaaaaatatacatggactgttacatcatatcaagtacaaaaatgggctccaaataaaacaagacctaaatatatgaactaaaattacaaaactctttgaggaaaacataaatgtatatcttcatgatctggtaatcagcatcaatttcttagatatgctaccaaaagcacaagcaacaaaaggaataatagatccaaaaatagattaaagttaaaaactttggtgagtcaaagggcactaataagaaatgaaaagataacccacagacatgggagaaaatatttgcaaattttatatctgataagggcctagtattcaaaatacaaaaagaactcctaaaatcaaccataaaagacaaaaaccatgattaaaaactgggcatcagattttaacagacatttctccaaaagaaaatgtacaaatggccaataagcatgtaaaatgatgggtgatatcattagacctcaggaaaatgcaaatcagaaccacaacgagaagccacttcacatgtactatgatagctataatcttaaaaaaaaaaaacctaaaataacaagtgttagtgaggatgtggagaatctggaacattcatacattgctggtgggaacataaaatggtacatcctctgtggaaaacagtctggcagttccttgaagagttaaacatagagttatcatgtgactcatcagttccactttaagaattatactcaaggtaattgaaaacattttaacacaaaatttgcacataaatgttcatagtaggattaataatagtacatacaaactagaaacatccaaatgttcaccaatggataaatggataaacaaaatgtgatgtatccattcagtgaaatattattcatacataaaaagtaaaaaaaaaaaaaagatcccaccctacaacatggatgagctttgaaaacataattctgcatgaaagaagtcagatgcaatgagccacatattatatactttaattaatataaagtgtccagaataagtcaattcataaaaagcaggttagtggttgccaagggagaagtaaaggtaggaggaaggattgagtgccatcaggtataggggttcttcatgggagtaatgaagttgttccggaattaacaagtggtgagggttgcacaagcttatcaaaatactgaaaaccactatattgtacaccttaaaaggtgcatgtcatggtttgtaaattgtatctcaataagaaagtagcacaaataattaactgaataactaaacaaatataagttaaacacacttgctttgattcctggactgggagactagattaccacttctgattctgtaagtgaagtttgttggcatacaaccacatccattggtaagaatgatctttgactgcctttgtcctatagtggtacagacaaggagttgcaataaagatcttaaggcatataaaacctacaatattcatttcctggctctttgctgaagtttgttgactcctatgttaaagcaatcaaatttttaatgaaaaacctttccaaaaagtacactgctggtccaggtggcttcacaggtaaatgctattaaacatctacaaattatacattctacaaaaatgttttaagacaagagaagcagagaaaacactt

SEQ ID NO: 1378 - DNA, 598 bp, Homo sapiens
cagagtcactcctgccttcaccatgaagtccagcggcctcttccccttcctggtgctgcttgccctgggaactctggcaccttgggctgtggaaggctctggaaagtccttcaaagctggagtctgtcctcctaagaaatctgcccagtgccttagatacaagaaacctgagtgccagagtgactggcagtgtccagggaagaagagatgttgtcctgacacttgtggcatcaaatgcctggatcctgttgacaccccaaacccaacaaggaggaagcctgggaagtgcccagtgacttatggccaatgtttgatgcttaacccccccaatttctgtgagatggatggccagtgcaagcgtgacttgaagtgttgcatgggcatgtgtgggaaatcctgcgtttcccctgtgaaagcttgattcctgccatatggaggaggctctggagtcctgctctgtgtggtccaggtcctttccaccctgagacttggctccaccactgatatcctcctttggggaaaggcttggcacacagcaggctttcaagaagtgccagttgatcaatgaataaataaacgagcctatttctctttgcac

SEQ ID NO: 1379 - protein, 132 aa, Homo sapiens
MKSSGLFPFLVLLALGTLAPWAVEGSGKSFKAGVCPPKKSAQCLRYKKPECQSDWQCPGKKRCCPDTCGIKCLDPVDTPNPTRRKPGKCPVTYGQCLMLNPPNFCEMDGQCKRDLKCCMGMCGKSCVSPVKA

SEQ ID NO: 1380 - DNA, 22909 bp, Mus musculus
ccacaggcagctctcactgagattctcagatcacgtccactccccctcttaaacacacatatccttccctatgacctattccttctccattttcattaaagaacctacagttacagagacacctccaagatccaaaccaagaagactcgtggaagcagcatcttatctttgcacatggcaggcagcatcctcgtgggctatggggtctacatctgcttctcctgatactctgtcgtcagctccaaaacctgcatgagttcagtgggattcagtgctgagaatcagcaatggctattttcagttgcacaaaagagacagtcctctcgtaggaacaaagtaaccaccacagaaacccaagcttgcatcaccagccacagcactgtgtcttgacagatcatagagctcactcctcactccatcatcaaagttatcattcccatatatagccaccatagcatcataacctccgtagatccggagcacagaccacctgcacctagctccatggtagccctatcctcttgctgttggtctatgatatggtcccagcggctgcctcagcaatgttataagtgaatcacagaaccctctgtgctttccctgcaacttctgaaggtctctatccagctttagatagttcaaccaggaggcaactgccccatctttagcatcaaattgagcatgacatttcagaacccagtgcacaccaatactgttggtttaaatgcttcatagtgatagtaactccaaccatgtgttcagagaacgtgatttgagaagggaaagccctccaccacctccggtgtgcacaactgctcttccagccacctctacatgaggaattgctaagctacacacagagccactatcagtcttgactggctcagaaacgaacttcccttctgtgtgccttagttcctgtgaaccagtcagtgaggttttctattgctttgttcctctgactcttcacggggattaatctctctggtttttcttttctttttctgggcaggaatgtgtggggagcgggtgtggcggcagtcccaaaggcgccagggactgcagctaagtcatatgacttgcacctgacttcctcatataagacacaaacatcttgagtgctgcgcaggtgtaccaggatacaggtgaatccaatttggtggagatttgcccctgctgccctgattagctgaagcctcgtgactggcgagggggcatggcctgcagtgcgtggatgagagagagtataaaaggagtgagaggcccagggttcgggggagatatataaacaagggagatataaaaacaagggagatataaacaggggagatataaacaagggagatatatggagaaagaagaaacaggactgaataaatgtgtgcagaaggatcctgtagcagcgtcgttcttcctggcctgttgagtgcgcgcaacaggaatgcttccactttcatcagctctgccttgttttgctctgtgttgttttgttttgtttgaggcaagtgtcatgatgtagcccaggctggctgaacttgagatcctcctgcctcagccttcccaaggttggaccaccacatcaggctcttcatctcccttctgtgtctgagctccccctgctctgttcagcagaactcttctattccatgaatgaaatacttcccaactccggaatgaaaaacaaaggcaagactcacaagctaagctgttgcagttttgtcttttgtccagatactatcacatctgttgggaatagaaaggaaagtaaggcgagctgagttcttgggacctgcagtgtatgctgtggtacagcagcacatgaactgcaccagctacacaccaacgaggagacataacagatattattagctaaatcaaggccaaaaatcttacttccatctggatgcagcagtgtttcacactgagtattagagcagaggaaaaacagacactctgtctccctcctttgtgtctctgcagatcatcgctgtccaaaatgttaactaacaccattaacctgggcctcaaaacttgtttactttgatttatttttttaaaaaagttgttttaaaaggcttttaataggtactctaaaagcattttccccaaaaggctgtatttgcataatattctcccatcttcaagcatccgtctcatcatacttgtattttaagagagcagctacactatgctgagttcaaaccccacctcttacactgcctcaggttaaacttagctctctaaagccgtttcctggcctgtaaaacagtgacagcaatgacgtctggcatatagggtttatgaggactggacaaaatgataatgaacaactgtctgtaacagtccctggcaacaacatgaacacaataaacattagcagctgtcaccagcaagcagcaatgccactcctccctgagtcaccctagctagaatatttggggtgaaaaatcccctaaacacaagtggaaaaagtaccaagattccctggaggacaacaccactcaaggactgaagactctcaactatcctattgacacagaagaccctagcattaagaaacaataacctaactgggcagtggaggctcacacccttaatcccagcactcaggagacagaggctagagaatgtctgtgttcaaggccagcctgatctacaaagagagttccaggacagccagggctacacagagaaagcctattttgagaagccaaaccaatcatacaaacaaaataacagactattggtttctcctggagtaaactgtcctctggaaggcattttctgcattctatatactaacaatgatatattttctttattattcaaaaagtaacagttattgttttttatttggtttggtttggtttggtttggtttggtttggtttggttttaaggggaaatagtgccaatttagaaggcatgctttttcagaaagtcatgggctcagtgtgaagagtcttacagttcacccactcagctcagcaccggagacatccatctgtccttagctcagcaaagagatctgagttatgaggcttttatttaaaaagtttctaatcagtttgctcaagaaaaaaagcatgaatttggaagtcttcatggaactttgtatacaactcagtgactttttgtttgccatatccccaaatcttggttcagatgataatggcttctggtagaatttgtagaatccatttttgtagatttgtagaagctatttgtcagatggctgccccgaaaccattgcagcaaattagtttagccctatttaaatacaagatagatcattttctattgcattacaagaatgtattgcttacactctttatagagctatatatttttttggatgtgggaatattacaatctagtttctagaggaaaaccactcaaagctgttcctacctgttacgtaaaggatgctgttagcaggggtaatacacagaatgtggtctcagatccttggagttctttgacatgagttaagttcctgtccttactagggcatctctcaagctgtgaaaacaccagaggaaatgagattgtgggatgtcagaaaggtctccctcctgcagccgcttctctgaaaaccaactagatacaaagctttgctctgacactaaaggaaacatttagaacagaaagctagtccgactcttccttctgaaatgccaattggccctgtgttttcctggtctattttccttctcctttctttgaaatcaatgggctcagtccctgtaaatttcccaagcaatgggtcgtgtagtaaacagaggtgtgtaactacaaagtgcaggttcagaccagcttcctggaaaagatggattagcgagtcactaccatctagaactgcctaaagagagctacagcttcttccacagcgcatggaagaacccagctcagcccagaaagcaccagaaagactttgccctcaactacctcctcaccctggactacgaaaccacaacactcattttctttaaaagaatttttttttattttgtaattaaaatataattacactgtttccccacctccccttcccttcctccctccaaacttcccgatgtctcaccctgccctcactctcagactcatggtcattttttctttaagtggtactagtacatctatatgcataagcatgaacccaacttgctgagtccattttctgttgcttgtatgtgtatacgttcagggatgacaggttcctattggataactgatttaaaggctcatccctggacaggattatttctccttgcaacctgtagctctttctttaggggtagggttctataagatttttcccctccactattttttaaaattatgtgtttatatatgcatgtcggtgtgaggatatgtgcacaaggatgcaggtgccctcagagtccagaagacagtctctatcccctgaggatggagttgtcccttcccagtccagggaacccattgggaccagtactcaattctagagggcagcaccagctcttacccactgagccatctctctggttccattatgtctcattttcacaaatattttcagcagtaacacaagaaaagccacagagacaaatgataaaacacaactttagacttccattcacttgcaaatccaaatggtttacagtaaacatccacgtacctagttacttacagaacttaaaggtgtgaaaaggaagatttcaccacacagattcaaccctcagcgactgctgctcacactagctaaggcgacaccccgtgcctcggtttccttgtttgtaaaaatgagaactgtatcagttacttttgtaaaacagtgaccaaaatatctgacagaagggacttaagggaggaagattttactttggccaacggctgtggaatattcagcccttggtcagtggctctgcttctaggcccactgtcaggcaggttaccatggtgacaggattaggtgactcaggagtatcttaatttgtccacagacagaaagtttaaaaaaggacagaaatgcccggcatggtggtgcatgcctttaatcccagggaggcagaggcaggcagatttctgagttcaaggccagcctggtctacaaagtgagttccaggacagccagggctacacagagaaaccctatcttgaaaaacaaacaacaacaacaacagaaattaaaaaaaaaaaagagccagatgacatataacatactccacaccatccaaacccccactgccaatgacatacttcctctgattatgtgccttctcccctgtgctacctcccaacaatgctatcatattatgtactcaacaagggatcatcagtccattgattaatccatgacccacttgtctctgaaacatcattacagacacattcaaaggtgggttgcactaaccccctagctatttcttaatccaatcaggcagacaattaaaactagtcgtctcagggataataataacagtattggtttacatcattattatctccatccatcagagctgtctagtaccaagagtattgggaatggtatactatttttttaaaaaaagaacataggcaaagctttagttttggaactttgatcacattccacattcaagcttgatcctgggttgggagtatctcagtgggcgtaggcttgcaaagccctggggcccatcccccacatctccccagacatttcccgttttagattgtatagcaactattccataaaaacaactagaagaatcttttttcttttctttctttctttctttctttctttctttctttctttctttctcctcttctttatgttttttttaacatttcttctattccaaatgcattaataagctgtctgtgcagccagggccttgagaagccaagatctttgaaagctggagaactcccaggaaacgcccctactgctggcactctccgctcaggcacttgccagttcataagcacagtgggtatggatcgaaaactgagacgctgggcagaaaatggctgttagcaggaaagagactctggcttgaggaggctcaaaaaaaagctgaaattcagatacaccaagttaaccagggcttcagacaaaatcctgaagggagagtgtaaaacggagattcttgtatgggcagagatgctcttggctcctgtgtctttcctcattcataagcagagcagggcaggtgtgaaacagacagaataaaaagcagttgaggaattatgcagaggtgatcatggtcttatggagatgaacaaataaacgctggggttcagagcccaccagagcagggaagccttgggaagctccttgtactttcagtagaaattcattctagaaatgagtacaaagacgtaaagactagcttttagaaatggaacctcaagccagcttgatccctcatggattctgggggtttctggttttggtctgactgctgacacccctgaacacaaactgtgtgtgtgtgtgtgtgtgtgtgtgtgtgtgtgtgtgtgtgtgtgtgtgtgagagagagagagagagagagagagacagagacagagacagagacagagagacagagagacagagagagaaacagagaaacagagacagagagagacagacagacacagagagatgtctacaagtcaatagaaaattaccagctatagagagacaggttcaagagcaaaatgtacattcagatcatacacaagtaatctagacattggaataatcagactcagaacataatgactgtcaacatggtaaggagaatggatacaagatgggggatgcctcaaggacctaaagtctacatagttttaaaatctaagtagaaattctagtaccaaaaaataaaaccacaagcagacagtaactaaaaaggcaacattcaataacagaacctagcaattgttgagacataagtgaagaaagtcagagtgacctagaacagtgaactggtagaaaacaggcaggtggaaacacctgaccccagttcttagaaagaaggaggaaattccaaaagagcatcatcaatcatgtagaaggtttcaagaggctgtctatgtgtctgattggaatccaaggaggttgtcgatggaaacctgagatgagctcaggttggaaactataggcattatttggagagctaattcacagctaagaactttccaaagctgatttaatcaggctatggattcctggtgagaaagctcaacctggaactccaggtgaccacctcaacttccccagtttctcctggacgcttgaaaggccctgctctctcggtcaggctactgcagtcgtctctgctggacattatgagttcatgagttgatgatgtattcctatcttcttcctgtttctactgccacttgatgtttatttttatttatttatttatttatttattgtactttcactcgctttaaacttaataaactcacccactcaaaactgaaactatggctgtcataagtaaccctctcaaccgttgaaatcagccctcagcaccacacaggaggctgcctgcactaagcaaatgccccgccaatgggccatatcaccagatttctttaaaaaaaaaagttttaagacaagctctcatgtcattgctcaggatggcctgccaccctgcagccaggcaggccttgaacttgtgcctcagccataaacatagctgggattacaggctgtactcatcactggctcagcatctaccaaattatgttaaaatgatggtcttgtcttttcgtttccagcactaaaatctctcattcgtttttctttcctatagcattgacctctatctctaatacagtactaaatactgttagggctaataggcaaacaaacaaacaaaatacaaaacaaaaaatcagaaataaacaaacaaacttaaagaaaagtaacattacagaggaaagtaaaaccatcaggaaatgtttggcaaacgtatacagagagcaagtacgcgtgagtcctcccgctcacccatggagtgctcacccaggaacgaaacatctgtatcccagcctccactgcaaggtttatagaccatgaggaagagggcatggaaacggtgtaaagggcagaggtcagggaggactgcggagaaatactgtttctctggaatacagcaacagtgcacttgccaacccaaggcagctgtcctaggagtcaggttttcaggttcacccaggcaagattccaacatggagcatgacatttcaggacttcttcaggagggacattcaggctttttttggggggtggggggtggggggtggggggagtttggtggccctggttagttgactctgctcctgatttatgagtgtttaaacaggacaaattaaactcatgacagaagtgagggaaggatcgttggagaaggcctgagggacaaatatgatcaaaatacattgtagcttgtgtgaattctacaagaatttttttaaagttgtattttaaatgcatgggttagggactgtgtctggtggccaagaatgtacactgaacagaggctctggactcacctggatggcaggaactacctttttgtaagagtttgccctctaggaaaggaacagctcccttaaatgagcttcattgtaacctcctgggcaagcacagctctacataaactattacgacatcagtaattctaatcatccattgtcccttgtccccagttcacagccacagggacctcactgatcagagctgctatggtgtccttcttattggcttggcttcgcccttttcaacagaggtccaccctgctgagtaagtgctcactgatctcttctgtccaggctttagtggacttcagaaggaagaggcaccggctcttctctcccgtgctcccaaaggcttgtggttatggagatggttgcctcaataggaggtgggctctgacagctggatgggtctgggggaagccagacacatggcaggctccaagtcaatgaccaagcagggcctcctctctctgcacacccagtgaggctgtcttggggtagaaaggagttaagttccaaggaatctcctaccccaaacctccaaattacagcttgtcattgcaagcttcgaactctcacactttctttgcaggagctgggactacgctcaatcagcctggggagttatcaggtgttagcctgttaccccactgggaatcccttcagccacctttgttctccatcttgaatggagccatgggttggccatatcctgccacctactcccttggatctgagctggacccttgcatctggcgtctacactgctgctgaaatcttctcaccgtgcacatccaaggatatctctatggtaaaagtccagaaaggctaaagatgttgtccacaatctctcggcaatgaccagatatatccccaccagtatcacaacttgcaacgcgctccgttcccatctgccctctgcctccctactgtgttgattcccatttccaaaactagctcagaatgcatcccactggcagccaggcaatgccttcttgcagatctggaggcttcaggagcctttgctgcctcttaggctcctgcagagagatggccttgctctctctgggcccttttcccccaagatgctgtgcagtcgtctcactaaatcaaaactgccagaactgagttttaagcgatatatagccaccacatctattttgttcctttatactttcaaagtaggacagattcgcaaaatacattgagtcagactcagtgtccacgatggagagacgagtgggtagcttgtgcttctttagaaggggcactgggcagcgtgttagggctagggggtagtggggcaggacagacctgtcccgggacaagagtggctactcgcaggccggttttgctttcgctctgagtgtggtgggcggtgggacggtcccgaatctcctcaaacgggcactccgagagttaattcgaaagcgccaccagccttgggggcgatcgacgcacttgtccttgagatgtagagacagagagagaaagcaagagacacagtcctgggaaagtcctgccggctatccagacaattataaaaatgtgtctcccaaggtcagcgttccaacagcctcaccctcggcatccagcagctcctctcagtgccggtccagcatgtgtcaatcacgctgtaagtacctgagggccgggaccagggtgacttgatgagaggagaaggcttgagaaagaacagacagaagccctggacccattaagggagactaaagggctgccagcaactgcaggccaagggaaggaagaggggaaagatggtcgtgctagattgcgctgcaccgagcatggtctcattatagaacaaccctgggggctacggctatgcccgtttcacagaagagaactaaagcccagccttgaaaccaatgtaaggaaaatgcaggtctcaggcagtccccaaacaagatctgggaggtcttgcttcatctgtcagccccggggaagggcttaaattatgtgtggagggaggtcagtacccagaatggatggaaaaaattgccagaatggctgaagaaagaggcaggtcaaaaccaagttgacaagctccacctgccctttgtttcccttccagacctcctctttttggccacccttgccctcctaaaccacctcagtttggccagggtcattccagtctctggacctgccaggtgtcttagccagtcccgaaacctgctgaagaccacagatgacatggtgaagacggtgagtttctcctgtccttctggcttcaaagttccgctgttgacatgacttctaacctatctggtatctgctgggaagtttatggtatctggcaggaaccgtagagggtttcaagacttctaaatataatctaaaggaaactgtgtctctagagaaaggaagaatggtaataaattgtaacggcatcggtttaggctgtgtctacacagaggaaagtggggacttgcaatgtccctcccagcctgcctgcctgtgtgacacagtgtcaggtgctccctgcttctgcttcagggcaggtggaacagggagacagtctctaggtacactctctgtgcttcacaagccatagagatgaattagattgtctctccccctgctcaccagtgtccagcactgtgatgcagtcccttgtcggatggacacatgtcagggaggactcagacatcagatagcaagcaggtccagcctccagttttctggggcaagtgtgatccagttttagtcacggctccactcatttttctcaggtttcatgtttgaatgcaaaatagccttttccgttgtaaaattgccacggtttcctctcgctttggggacaaagctacagcaaaatgctaatgtgtttgagatatcctgcagctgctagggctggagatccagtagaattctggcttaattatgaatgggtctcccgggttctatcccccaacagagcgtgcgttcataagcacctgggaacagaggagggaaggagggaaactctgtcttcctgttttgtttttaaatctttcttgaggatcttctagcttgttgtcttatggctatcccaacataagctccgctccacaagcccttcttggtgaattttctttctttccttcccgtcttgcataacgtgctgctggctgttcctccaagctcagtcttaattgagtggggttcccaggagggagagatggctctgtggttaagagagctggctgctcttccagaggtccagagtttccacaccctcatggtggctcacaatcatggtaactctgatcatagggaacctgtcgttttctctgtgcctctgtgggcactgagcacatgccacacagacatccatgcaggcagaacactcttggccatgaaaccttaaaatgaaggagaaaccttacgagaggttccctaaggaatccctgcagaagggagagattgttttcctaagatgaggtttggtgtggaggggatgaggtattcaaagttaactagccgctcctcactcctctgctgccaaataccagcactgggcttcgagacacaatagaattcgaccttgttttcgtttgggtcactattgctctctagttgaacacggaatccacgggggcacattgctgtctgtcctttgtcacaccccaggaccacagctgcatggaaaagtcatcgcaggcttcagtcagagagctgttgacttcctaatatgttgtgtaattctgttcagtggtgctttccagcacaccagggaataagagacagtccccgcgtatgtaaattaaagctcaactagtatttagggcttgcaagtttgttacagccatcaagctgtgactttaacagtttcctctttagaagttaaacttgaaaaaaaatagagggagagagagattcacagggcacagctgcttggaaaaaggaaaagccacaggactcaccagaagcaagcagcacagtgtggcactgatgctgatgagtacagcctgctgcaccccagtgttcacatggtgaaaaaaataccctgctggcggacagcctaggcaaagggggaggagagtagggagagcgtgcgggaggttgggtttcttagcttatgaagagcctgagtttcctacaggccaaagagatgacggttcagagtggccagcctaggctctgctgatccactgcgatgcaggtctcagagggaaccagctgtcttgctgagagattcacctcagcttctccttatgtttttcccaggccagagaaaaactgaaacattattcctgcactgctgaagacatcgatcatgaagacatcacacgggaccaaaccagcacattgaagacctgtttaccactggaactacacaaggtatggaggacccccacccaaaaaacaacaacaacaacaacaaaaaacacaattaagagccgtgcagccaacctcagctgtctccagatacttacttgtagctatcaaacgtgagagttttgaagaaaaaaaaaaaagtcaacaaccatacaaatacttctacaagctgaaggatatactcggtaactaggaggtggctatggtggtatagacctttaattccagcacttgatggatagaggaaggccggctcctgttaagttagaggccagtcagggatacacagcaagatttcatctttaaaaagaaagggggtggtgtggcgggtgaagcttacttattgaagtgctcatgtcacaagcctggggacctaagttcccatccccagcacccatgtaggagctgggtgtgatggtttcacatgcagagacaggaggatacctgggccagctagtctagccgaatccatgagctgcaggcccagtgagagaacctgtatcagaaaacaagaaagtcaggagagcggctgagaaagaccccaaagatcatcctccgatttccacgagtacatgcacctgcacacacgtgcacacaggaatcctatacatagccacccaaaagcagttatgatggtgaagtttcttttactggaatgaaaagttagtttgagaaaaaaatatcagagagatttatattaagagtgaatgggtggggggtatgcatgcctttaatctcagcacttgataggcagaggcagatggatctctgtgagttcaaggccggcctggtctacagagtaagttccaggacagccagtgctacaatagaaacaggtgatggtgatgatggtgatgatggcggtgatgatgatgatgatgacgaagacaaactcctcggtttatgattttcttctagaacgagagttgcctggctactagagagacttcttccacaacagtaagtaagcactctaagggttccttccccatgacggattcataacactgatgcctggtcattctttctctagagagggagctgcctgcccccacagaagacgtctttgatgatggtaagccacatcacttttctgaaatgcagcagggtcctgtagttccagcccatctcaatgattccttgcccattgtgtcctgcgctctagaccctgtgccttggtagcatctatgaggacttgaagatgtaccagacagagttccaggccatcaacgcagcacttcagaatcacaaccatcagcagatcattctagacaagggcatgctggtggccatcgatgagctgatgcaggtaagccttcctcctatcagccagcgctccttttccatggtgaagagaggtcctttattagatatgataaaatcagcacagcttgggttgggagagacctgaacacccccaccccaccccacaccctcatcccccaaccatgaaaggccttgcaaggttacatttgcttagagagccttgagggggcctctacaataagggcaaatgcaagcagccttctacttgttgactcatgatacaaatcaggcacttttcaaatgcttcttctcataccatccccacaacaagcaaataaggtctctacagaggaggaaactgaagcttaagaggatgaacgagggttccctacaaaagggttttttgttgtttggtttggtttggtttggtttggtttggtttggtttttccgagacagggtttctctgtatagccctggctgtcctggaactcactttgtagatcaggctggcctcgaactcagaactccacctgcctctgcctcccaagtgctgggattaaaggtgtgcgccaccattgcccagcttattgttgttttaaatacattcttttcttaaaggttcaagattaggactggagagacagtccgatgattaagaggacttgagtttggcctggggctcctatgtaacaaacagggtgtggtcctgaactgctctctaactccagagagtggagacaggaggcctatggaggctttcttgctgcaagtttagccatgaaatctccaggttcagggagaaagcatgcctcaaagaaataagatggagagtcacgtgatctcttctctggcttctgcatggtgtaggcacagatatgcacatgtttgagtgcatacaatacaggcaaacatacacgtgtcctttttaaaatgtataggatggacattctaggggctgcacacatattcaaatattactaggggaagcacttggggctggtgtccaagtataatctattttgaaccaaaatgtgaccaaaatgaaaagtggtcttacatctaggtaattacagtgttaggtatccgtgggaactttgctgtaccaccagtaacacaaagcacaggagtgtgcacaccagagacaagcaccttggcaaccaaggcgtgggatgaacatatgttcagaagtcactgcctggaaagcaattgtttttcatttcatacatactgtcttgcacagggtttctatgtcttagataaaatatcatgacggaaagcaagttggggaggaaagggtttatttcatcttgtagagtgtagtgagtctattacccagggaagtggaggcagaagctgatgctggagaggactcctggtgactggagtgctccacatgacttgctcagtgtgctttgtatagcacccaggaccaccaggctagggtgagctggtgcctcccacatcaactgtcaatcaagaaaatcaccagaggcttgcccactggccaatctggctggaggtgtttttctcaatgaccacaggcttgtgtagagttaacataaaagcacccaggacattacatattgccagatgactcctttgaaagacagtgaagtttatgcaggtcaaacaacctatcatgtagagatttgtaatggatattgcatgaacaaggccagaagtcaggtgatttggatagtaggaagaggtctaccagggaccagccaactatgctgacagggttaactcttgtcagcctgtttgtaaaataagatgactttaaatagcctatgtctctcttgagatttttgtgaggagcaagcaaaaatcttaaacatcacagaaacctaagttcttattctatgttatgaaatcaaaggatcgagtggggaaacacggtactggcttgtttatctaccacaaatagcgtttctatcagagataggtctgttgttgataataagctctaatccatagatcctacttaccctccaactccctcctctaaaagaacaggacttcttaacataatttataaaaattaattagctattgctgcaggtgctacctcatagactcacaccttctgagagatcagctctaatgacaatttctttctggaaaatttaggggtcttgtcagagatcattaaaaacataggtatatgctcacaaaagagtatttcttccctcttttcctgcaggaacacagcaggagtagatgtgaaatgggtctaggagtgtgatgaggggctaggttgcaggccctggactttgcattgactgtctcccattttgcagacaaacattctaatttttaaattgtgcatatgctatgcttggtgtttctttctagtctctgaatcataatggcgagactctgcgccagaaacctcctgtgggagaagcagacccttacagagtgaaaatgaagctctgcatcctgcttcacgccttcagcacccgcgtcgtgaccatcaacagggtgatgggctatctgagctccgcctgaaaggctcaaggccctctgccacagcgccctcctcacacagataggaaacaaagaaagattcataagagtcaggtggtcttggcctggtgggccttaagctccttcaggaatctgttctcccatcacatctcatctccccaaaggtggcacagctacctcagcatggtcccctccatcgcttctctcatattcactatacaagttgtttgtaagttttcatcaaaatattgttaaggggcgaagacgtcctcccctcaatgtgttagcagaagagcaagaactgataagctattgtttttgtgccaaagtgtttatgaaaacactcagtcaccccttatttaaaaatatttattgctatattttatactcatgaaagtacatgagcctatttatatttatttattttctatttattataatatttcttatcagatgaatttgaaacattttgaaacataccttattttgtggttctaataaagtaatgttatcacttcacagatgttcttggagtctctatctatctatctatagattatttatttaattacttaaacaggacctcgctgtggagaccaggctggcttctgactaacagagatcagatgacctctgcctcctgaatgctggggccaaacctatttctcactttgcccagctaactagagtgtttaagtgctctgagacacactgcaagaaaactgtcttagtttgcactctattgcgctgataaacaaacaccatgaaactggggggaggggcatatgccatgttacagcttagagtctatcactgagggacatcgggcagaatcctggaggcaggacctgatccagagaggatggaggagtgctgcttactggcttgctctccatggcttgcttggctggctttcttatacaacccaggaccaccagactaggattggcactgtccacagtgtgctgggccctcctgcatcaatcattaatgaggaaaatgccccctcagacttgcctgcaggtaaatctgatgacattttttttttcagttgagcttctgtcttcctaggtgcccctagtttgtgtcaatttgacaccacaaacttaaaaacagcacaaaaaattctgatttgaacaaaataatcttgcaaagacggccacaatggggcttgggggatggctcagtgggcagtgttcatcttacaagtgtgacaagcagagttcaggtacccagaactcaacctgtaaccccagtgttcgtcaggcaaactggggactactggagcaagctggctgagttgagaggtcagactgatgacggtctgagagagagactgggcctcagtacacaggcagcaagagatcaagaaagacactcaacagcagccttgggcctccccgcccatgtgcacgctcatgcacacacctatgcatccacacatttgaacacattacacaagcatataccacagatagatacatgaaaaaaaaatggccaaagtgttctgactcatttcccaatccccttaatcttgtttttgcggggagaccaggctggcctcaatactcaagtggctgtgtgaattacagtttttaaggattacatgactatttctgttcaacatttgaatctcaaacaaaacataactgaaatctttctccctgacaacctcgggccatgacctgctgtgcattaaacaaatacattatcacactcttcattggaaaacgtgtcctgtgaggctctctaaattattccaattcgtgggaccctttgggctctcagagggaagccctttttaaattacaaacagaaaaactctctacttgcctaaattatatagaacgttttcccaaaccccatgtataattgctttcttttggtttaagaagtgtctttcttctggtcttagtattaattctgtcttcctagttctttaaaccacgcgaatctaaagagtcccacaacagaataccacatcatttggttctgggataaccatgttccttcctaatagaatagggctctcgggcctttatttagagaagcaccttttctaagctgtttcttcccaccaggtcccccattcatctccaggggtccagaggaaaataattgtggcctctcctctgtgacaaactcactgtccaattctcactctctacccatcatcagataagtcgctggagaccagattcaccaaagaactgggtaactgtaggcttttcccagtcaggggctcccctcaggcagggactctacccagtcaggggctcccctcaggtagggactcctcccagtcaggggctccccccaggtaggggctctcctcgggccagggcccgtctcaggaagggttattttttcctttgagcagctcagatcacagtgactctcataggctgtggagtcgctggctactccttctagagaatgacactcactgtctatctcatctttgagtcaagcccagcaagagaaggtctcctccacagacttgtgtccgtgtagaggaacacactcagtacatttgtcctaggcaccaatatgagatgtgctttaaataatgtctggaggtggacatggtagtacatgcctgtaatcctaacacttgagaggctacagcaggaaggctatgagttcaaagtcagcctaagctttaggccaagatcatatctcagacaaaacaaaagcaaacccaatgggcccaagtgaggtcttcaggacaaattccattcctcaatccatagttagttctcacatcttgctagatatatgcagcagtgttacgtactctgaccaagtgttttaatggctcccccacccctccgtgccctcttccaagaaatgaagataatactcaaacttgcctccaaggatcagagtgatggttaaataaaatgatttgcctggccctcagtacacagcacatcttagtaaattttcagggttatttcatctttggggatggcaactcagagtaattaaaccctctgcgattgcttcattggtgaaatttaagagagtaaaacaaaattcacagttactgtaaggattaaatgaggcatggatggagccaggtgtggaagcacatgcctggaaacccagcacttgggcagtagatgcagaagcatcacaagttcaaggctagcttttactacaagagtgtttgacaccagcctgggccaaaggagacctgtctcaaaagcacacatacagtaaagaaataagacactgcgggtacctaatgggcactccaaatcaaactgttaaagctctggggttatatctttgatacccatcactggtcccaccaggcagggccaataagatggcttagcagacaaaggcactggaccctccagggcactcagctagagtgtggtcagccgtaaaggttgcctgtggaaaattcaggcaaaaggcaaggcccctccctccaagaacaaagactgagggcctgaacttttcagaccaaatccctcagtttaaaccatgcccaggcacagcccatagagtccccttgacctaaatgctccgctaaaaaggaaacaagcctgaccgcctctgacacagagaaggatccacctgaggattggcatggaaaacatgggggtggaatctgcctactgaggttcctcagaactggggaaagaggcctggtcacatgtgcaaaggcagatttggaaaactcaagacatgccaaagggtcctctgtctccaaagggaaagtgaaattgcagaaacaaatggggaaaataggtttaatgtgagaccagccccatgtccactatagacacttttggctgtgtcaacaggcatttctattgtccctttactgtcaacatttctttccagctaccattgtgacttcataatttaacctaaggtacatataaaatttaaaatcaacaagtcctactacatcttctgaagattttaattgtctatacctgaaatgaatacatacatgcatgcatgcatgcattcacacgtgcgtgcgcgagcatacacacacatacacacacacacatacacacacacacacacacacacacacacacacacacacacacacactgtgtgtaatcacagttactaaggaggctgacaaaggtggatcacttgaccctgcagagaagtggagggaagcctgaccttggcaacaaagaatttgtctccattttttttcattaataattgttatcacatttgtttattgtgttgcacacatgcataggacacttgtgaaagtcagaggacaacttttaagagttggttctctccttccaccacataggttctggtggtccacctcaggctgtcagaagagcatccttccttacctgctgagccatctttctggccctcaaaaggttttgtaattaaatgtttaccaaaaaattcatttaaatgtatttggtgaaaaaaaatcttcagtggtatctatgtatccttacatttgacactaaaatatcgatgtagggaccaagtatatggtgcatacatatagtcagagcattaggctattgaggcaggaggattgaaagtttgaggacccagaacggggtatttagtaagactctacctcaaaataaaataaaaagaacagataataaaataaaaaatcaagtttcattagataccttggtgtgactctaaccaagcaagtgaaagatctctatgacaggaacttcaagtctctgaagaaagaaattgaagaagacctcagaagatggaaagatctctcatgctcatggattggatgaattaatatagtaaaaatggccatcctgctgaaagcaatctacagattcaatgcaatccccatcaaaattccaaatcaattcttcacatagttagaaagagcaattagcaaattcatttgggaaaacaaaaaaacctaggatagcaaaaactcttctcaacaataaaagaacctctggggaaccaccatgcctgacctcaagctgtgctgcagagcaactgtgatagaaactgtatggtgttggtacagaaacaggcaggaagatcaaaggaatagaactgaagacccagaaatgaacccacacacctatggtcacttgatatttgacaaaggagctaaaaccatccagtggggaaaaaaagatagcatttttaacaaatgatgctggttcaactggcgatcagcaagtagaaaaatgtaaatcgacccattcttatctccttgtacaaagctcaagtccatgtggatcaaggaactccacatagaaccagatacactgaaacttatagaggagaagtggggaagagcctcgaacacatgggcacaggagaaaacgtcccgaatagaacaccagtggcttataatctaagatcaagaattgacaaatgggacctcataaaatagcaaagcttctgtaaggcaaaggacactgtcaataggacaaaaaggcaaccaaaagattgggaaagatctttaccaaacctacgtctgatagagggctaatatccaatattacttatattaaggtatacaccttatctccatatttgctcctgttagcattttgttctccttctaagaaggaccaaagcacacacactttggtcttccttcttcttgagcttcatgtggtctgtaaattgtatcttggatatttggagctttggggctaatatccacttatcagtgagtgcataccatgtgtgttcttttgcgattgggtcacctcactcgggatgatattttctagttctatccatttgcctaagaacttcatgaattcattgtttttaatagctgagtagtactccattatgtaaatgcaccacattttctgtatctattcctctgttgaaggacatctgggttcttttcagcttccgactattatgaaagtaaaatgtctccatctgaaagagataagcatagtcagtccacagagagggtcagggaagacagaggagtgctgacgtggcagcaacaattagaaatgaagctaaggcatgtcctactcacgaagcatgacagtgccagcccttagaggtgagtgtgtgtgactctgtgtgtgtgtgtgtgtgtgtgtgtgtgtgtgtacatgtgtgtttgtgtgtgtgtctatgtttctgtgtgtgcatacctgtgtgtatgagagagagggtgtgtgtacgtgtgtgtatttgtatgtgtatgtgtgagtatgtgtgtatgtgtgtgtgtgtgtgcatacatgtgtgtgtgaaagagagggttgtgtatgtgtgtgtgtgtgtgtgtatgtgtgtgtgtgtgtgtgtgtgtgtgtgtgtgtgcac

SEQ ID NO: 1381 - DNA, 1273 bp, Mus musculus
gcaagagacacagtcctgggaaagtcctgccggctatccagacaattataaaaatgtgtctcccaaggtcagcgttccaacagcctcaccctcggcatccagcagctcctctcagtgccggtccagcatgtgtcaatcacgctacctcctctttttggccacccttgccctcctaaaccacctcagtttggccagggtcattccagtctctggacctgccaggtgtcttagccagtcccgaaacctgctgaagaccacagatgacatggtgaagacggccagagaaaaactgaaacattattcctgcactgctgaagacatcgatcatgaagacatcacacgggaccaaaccagcacattgaagacctgtttaccactggaactacacaagaacgagagttgcctggctactagagagacttcttccacaacaagagggagctgcctgcccccacagaagacgtctttgatgatgaccctgtgccttggtagcatctatgaggacttgaagatgtaccagacagagttccaggccatcaacgcagcacttcagaatcacaaccatcagcagatcattctagacaagggcatgctggtggccatcgatgagctgatgcagtctctgaatcataatggcgagactctgcgccagaaacctcctgtgggagaagcagacccttacagagtgaaaatgaagctctgcatcctgcttcacgccttcagcacccgcgtcgtgaccatcaacagggtgatgggctatctgagctccgcctgaaaggctcaaggccctctgccacagcgccctcctcacacagataggaaacaaagaaagattcataagagtcaggtggtcttggcctggtgggccttaagctccttcaggaatctgttctcccatcacatctcatctccccaaaggtggcacagctacctcagcatggtcccctccatcgcttctctcatattcactatacaagttgtttgtaagttttcatcaaaatattgttaaggggcgaagacgtcctcccctcaatgtgttagcagaagagcaagaactgataagctattgtttttgtgccaaagtgtttatgaaaacactcagtcaccccttatttaaaaatatttattgctatattttatactcatgaaagtacatgagcctatttatatttatttattttctatttattataatatttcttatcagatgaatttgaaacattttgaaacataccttattttgtggttctaataaagtaatgttatcacttca

SEQ ID NO: 1382 - protein, 215 aa, Mus musculus
MCQSRYLLFLATLALLNHLSLARVIPVSGPARCLSQSRNLLKTTDDMVKTAREKLKHYSCTAEDIDHEDITRDQTSTLKTCLPLELHKNESCLATRETSSTTRGSCLPPQKTSLMMTLCLGSIYEDLKMYQTEFQAINAALQNHNHQQIILDKGMLVAIDELMQSLNHNGETLRQKPPVGEADPYRVKMKLCILLHAFSTRVVTINRVMGYLSSA

SEQ ID NO: 1383 - DNA, 27277 bp, Homo sapiens
gcctgacagaaactaacatcatagagagcctctgcagtttttcctatagaatgtccagaattcaatttaaaattataggtgtacaaagacaggaaaaagagattaaaaaatacacaatagaaacagacatgcagattatccagatgctaaaattgtcagatacagaatataaaataacactgattaatatgtttaagaaaacagatgacaaaatggagaatttcaccagagaattgaaatctaagtgtttttttaaaaaaggtgaaaattatgaaactgtaaaatacaacaactgaaattaaaacttcaataaataaatttgacaatagtttaaacacaggtgaagaaagtattagtgacctagaagattggttggtagaaaatatccctatggaagcacccaagtatttttaaaaagaaaaaatatgtaggcaataccataaaaacaggaaaaggtctgatgtgtaattagagcttcagaagggtaggaaagtgaaattgagttgggagcaataggtgcaacatttgaagaggtaatgacaaaaaattttccaaagctgatttaaaggtatcaagctatagattcaataaatgctacaaatctcaagcaggataaatacaaaaaaatacacatagaaatgtaataagtaaattgctagaggggaataacagacaaaaagaaaattctaaaagcagtcagataatcgtcctaaacaaataaattacctcaaagaagcaacagtaagactgatggctaacttcttaacagaaacaatggaagccagaaggcattgtgatgtcatctttaaagtgatgaaagaaaataactgccaaacaaaaatatatttcaaaaattaaggcaaagtaaaaatattttcagacaaacaaaaggtgatggaatttgttgtcagcagacttgtgcttttaaaaagtctaaaggcatttgttcttgaggcagaagaaacattatcactgatggaagagcatatacaagtgaaatgaatgaaaaacactgttgggaggctgaagtgggaaaatcacttgagcccaggaatttgagaccagccttggcaatatagtgagatcctatatctacaaaatttttttttttaattatccaggcatgatggctggcacacacctgtagccccagctatcaggaggctaaaggtgggaggatagcttaagcccaggacttctaggctatagtgagctatgatcacaccattgcactccagcctgggcaacagagtgaaaagtctctaaaaagaaaaggaaaagaaaaagaaaaaaagagataaacactggaagccaaacatgaataatgactgtataaaacaataaaaatgggtgtttgggcactttaaaaagctagtgccagcagcctgcttttcaagtctcatgttgagaaattttcatttcataaagagaaaaaaaaatgaccttgactaggaatattctgttttcttccacattaggagcccaaataccatcatagtattactaatactcaccaaagagggcatgtgatggacccttgagggattatttaaagccctagtagtcactgtttagagatcaatgccatgaaaggaaactggcagcctgctggggcaatgatgcttgtgttacagtgctctaccctctatctcattgtgtatacagtatctcaatagctcctcccaacaaccccaccaggcaggtgtatttctccctattttatagaagtttagaaacattaaagaaatgaccaagatcacacagctagaaagggatggaaactgattttagcctgaactgcaaagcccatagtttttccactttacaaggccatggggcagaaaaattctagccagttaaattatattggtacacataatagagttaaaatggtattctaaatttaaatgtgcatagtacacatgcagaatacttacaaaacagtgagaagacaaatgggtgggtgggtggatggatggatggatggatggatagatgggtggatagatggatggatagatggatggatgaaaagatggatggatagatagagtcagacacaaagcccctgacttgagggtagagagttaatccacttacatactcaatgtttgatgttcatatggtaaatcctgcaagaatgctgctacatagaggaaattctctgctcaaaagctgtcagaatggctacagcagctgtcttagcagttaaaatacaaataaaaacaaaacaaaaataaatgaagctataatacatttgtatgttaaataattcaaaaagtacagagcatattcaataaaagtcaggttttcctcctacttcaaagactcaatctacttctttagaggcaatggtcactactcttagaagcatagatttatatctatactacacgtgtatctatgtgtgtctgtacatgaatatacttttttctctgtacaaatggaagcatattatacactagtctgaaccttgattttgcacgacttttcaagtaatgaagatttttcctgtcatatatataaatctgcctcaatctttttgatagttgcataatagtcccttgaaaagatgagtcatgttttatttaaatggtttcctgctaataagacattggaagcatttcaagttttttgatactaaaaatgatatttttaatggaaataagtctttatgcatacatgcaaatagttttataggataaattactagaagtagaattgctgaacaagtgtatgtgcatttttcattttgatagctattgccaactatccctccaaatagatttcactagattacacatttccacatacccttacacactttacaaactatcaaacttttagctttgcaaactacaggataaaaattatatctattatttttatttgcatttattcaattatcagtgcagctgagtatttttcatatgtttataagtaatttgtgtatctttttctctgagctgtctgttcatatcctttgcccagttttgaattgaattattggcctttttcttattgacttttgcatttacacagtgacattagctcttggtttgttacatgttcatgtaaatgttttttctgggttatgatttctctttaaaagttgtctataatattcctatagacaactcaaaattcctatagacaacgaatcaaaatatttgatttttacagtcaaatttatcctttttttctttataatgtctgggcatcagatgatcttaattattcatgagactacaatgcccaggtgttgtatcatattcagataagttgctaaactgtctcaagatgcagaaaagtttgcaaaagtattcatacaatctttattctggagcaccaataagtaataaatgacacctttctggattttttttcttgaagcccgttgtcaagatttttgaagtctctcaaaaacaggatagatggctcatggatgttccctacagacactgtgtcatgaatatttaggactcccctccaccgctattgagaagttgccacttaatgtttcaaagagagcaaagaaatagttttggaagaaactgtatgtgtgtcttaatctaaaattaataactatatttcactatcactcactgtagaatgatatctaatattgttgacattctaccactttacaaaattcttacctgttcactgtataattgatctgcgtgacaaaactagcacaacaaaagattaccatctccattttgctgatatgaaaattaggaaaggcagtggcttgccccagcttacataggtaccaagtagcagaaagaggctagaaattaggtcttttgatcgtaggcccaaagttcctttagtgctatagcctttctggctccgctcacttactatttctccccctgctgctcagatatgtcagcaaagaagaaagagctccacagaaccaagctcctcagcatgtaacactgggggttggtgttcaacaaggaacacagagctctgcttcttaccctgacaggccacctttcaggattgaagctcaggattggaatccagattgatgccatgtgggcaccagctgatttatgctcaagttgaatgacatttatggacaagagccacaggaaaactgacagcagagaccttgctattttatgaaggaaaatcacgtttacagtgctgacctacacatgcaaatttacggtctcaactgatcacaagcctctttgggatctcacttcatctgaggatgagctgccaccctaaattatggcaccaaagatatagttccaaatcttctgttcaggtcctatgactctgaccttgtctacttgtcagggagaataacaatgaagacaggcatatcgagctatctactcaaatcagccagggtttctcttccagcactactgatactttgaatcacaaaattatttgtctgggggggcggatgggcgggtgaggggctatcctgtgtaccgtagaatgttcagcagcatttagcaacattcttctacccactagatgccagtggcaacccccttcctccaattatgacaactcaaaatgtctccacacattgccaagtgtcccctggggagcaaggccatctccaactgagaaccacagaaatagatctttaatatattctgtcaaatttttgaaaagacccttgtctctcagtgatgaaaatgcctgattgactcatagctcaaaccgaatgggaaaggaataactaacaataaaagctacctgaattcccagcactttgggaggccaaggcaggcagatcacgaggtcaggagataaagaccaacctgggtaacacggtgaaaccctgtctctactaaaaatacaagaaaattagccaggtgtggtggcagccgcctgtagtcccagctgctcgggaggctgaggcaggagaatggcatgaacctgggaggcaaagcttgcagtgagccaagattgagccactgcactccagcctgggcgacagagtgagactccgtctcgaaaacaaaacaaaacaaaacaaaaaactacctgaatgtaccaaatagcaattgaagtttgcaaacaatgaccttgagtcatctgcttacagaaggtgtctatctgtcttttggacaaaggacttctgatgaagaggatggagtggaccatattctttaatccatgacgttatttgtccccatcaaatacaaatatctaaatgtatttatatattttcattatcactagtcctcattctcattcccctcactccccagtgggatctatcctactaatatatatccttttgtctgtgtctttgtataatgtgtactattttgaatatatcattctcatttaagtcaatagagttccgcaatcacttactcacaattcttaaacttacacagctctggacaccagaagttttctcttaaattcttaacagcgaaatctgactgaagcgacaaggggttacttggggttctttagccactcaatgtaactattcctatgttttgctgcggaactattatgcttgattatgcgatgccacctcttccttttctaaattccaagcattttgaattccaaaaacaaatctgagcccccccatttttttctttttctttctttcctttttcttttcttttaagtgagacagggtctcactctgttgcccaggttagagtacagtgacacaatcatggctcactatagccttgaccttccgggctcaggtgatcctcccacctcagcctacttggtaggtgggagtacaggcatgtgccaccatgcctgactaatttttgtattttttgtggagatggggaatccctatgttgcccaggctggtctcaaactcctgggttcaagcaatccactttccttggcttcccaaagtgcttggattacaggcatgagccactgtgcccagccccaaagggttttaattgtctacttatacattatagagagagatcttactctgttttcctgtttttactcagtattatatttttaatacatatccatgttactgcatgtacatctagtctattacttctaactgccgtagaatactccatgaagtggatccctacattccactcacccactcccccagtaatgagcagctacattgcctccagttccccatcactacaaacaatgacttaatgaacatcctcatacatgttcctttgtggacctgtatgagaatctccataggatatacacccagggttaacagctgggtcatgggtgtgaatatacttaatctggtcaaggaatgccagaatacccttcaaaacagccatgtcagcctactggcatggtgtgatataatagatcctgtagtcccccattttcccaacacttaccagtatccagtgttctcaacttgtcagtctaagaggtgtaaagagatatctcattctttttttcatttgcattttctgatataactgagcctccaggtatgctcattagtctttggggtttcttctcgttaaattgcttattcatgagctttacgcattttttactagtgtttctgtctttttcttgctgacttacaagagttccttgtttttagacattgaaaatattggttttagacactgaaaaatatcttctctcaatctgtcagctgtctgttcatttggttcatgcatagaggaaatgtgtaaaacagaaatcttcatttttatgtaatccaattgataggtattttgccttatggtttggagctttagaagttttaaaaaagtccttcccacttataagtgacaaagacagtcctctatattttcttctactactgtaacaattttacttttcacatttggtctttaattcacttccaaatggattcacctctgttgttttagattggagtccagttttatttttcatcatacgctgaacattttctctttttaaaaaaattttttgtagggagtttttgctcagactggccttgaactactgacctcaagcaattctcctgccttgacctcccaaagtgctgggattacaggtgtgagccattatgcccagcccattgagtattttctactaaatattgcatgttttcctcattgatcagggaatcatctgtattatcttatacttaatacccaaatatacaaatctatctataatttctctactctgtttcaatggtccatatgcctgatctgttgcaaagatcactactttaatttctatggctttaaattatgtccatatgtgatagggttagtcccccttttcattattcccttagcatttttacttaaggccaggaacagcagctcacgcctgtaatcccagcactttgggaggccaaggtgggtggatcacttgagcccaggagtttgagaccagcctaggcaacaaaactagactccgtctctacaaaatacaaaaataaaaattagctggacatgatggtgttgcctgtggtccaagctactcaggaggctgaagtgggaggatcactttagcccaggaggtcaaggctgcagtgagctgtgactgtgccaccactacactccagcctgggtgatacagtaaaaccatgtctcaaaaaaaatttttttaacttagtcatagattttattacatctgtattttagagtaggcttattattaagtttctgagaaaatttatttgtagcttgtattggaattacattgagcatgtgaattaacgaaaagaggcttaagctttctatatagagaaaccttccacccaagggtatagaattatttaattaaatcacactatattcttgactgaactttaaaatttttctccaaacactattctgtagttatccaagctcatgtaataatcataataactctatactgtaggtacttttattatcatcatttaacagatgaggaaactgagcccagagagataaataactcacctaagaacacacagcaagtaagtagcagaacctggattaacatagtttagtccatactcttagccattatactgcctctgtatctacagtcagttactttatagtttggctgcttctatgcatgtcatcttgtttttattacattttctgatggattgttgcagatacaaagaaaatcggctgattttttttaagttgatatgtgtattgcatgatgttgttaaattctcttcttagttctaatagtctattaattttttttctttttgtatatcaactgtaaaaagtgacagttttaccttttcttttccaatgtttaaagctctcatttctttttctttccttatagcattggccgagacctccacgacaatgctacacactgtgaagtagtgattgtgagctaagactgtcacttatagaaaaatcatgtattcctagaagaaggttttcatttcatcttagctagaggacatggagcacttcaggaaactatttcacaaaaatgtaaattagaaactgtgtctggtagccaataatccatttttaacagtggccctgtgctcatctaagcaacagaaattacttttgtataggagatggcccttccaggggagaaacagctcagttgtgatacacttgtcttcatcctgactttaagtacatttaactccacactaaacccttgtggccacaacacagctctgcacctgtcatttgctctagacaaactgctaaacgcaattgtttctgacaatggattactctgtatcccgtgggggaattctcagacagcagcattagaaggggccttagagatcaaccatttctcttattttacacacacctaaaactccctacagccgtgcttcatcagcttcgagcagatgagccacccagaaggcagctccagttattaggtcctagggcctgggtgtagtcaggccctttggaagctccaagtcagagatcaaacacatcctccccactacccacgcctagggtgactaatgcctgtgggaaaaacaactgaactaaaaagtcccacaggaacctcaaacccagcacatccaaaatggaacttctcaccatctcctccaaactcagtcctcttatacagtaatccctgtaaagctagaacaatctccattccccattctcagggccttcctctcccgctcacctgaggagctaccaagccttggcccacaagccctctgagagtccctcctgcccaccctgtgttctccatactgaataaggacttggccacaccttgtcaactcttccctctgctctactcctgacccctggatccatccttcatgctgtggctgaagggatccccccatcatgcaaattctgccacatctcccgcctaaaacccaggaagactccccactactctcagcacagaaagtacactccttagtatggcatcccctgccctcatggcatggccccatccagccctccagcctcacaccctgcaaggacacctagacccccacctccctcaacccttcatgactgcgcttctgatccctgtttcccctggctagaccctgcgtgccctcccgctggaagcggtctaatgcctgcttgtttttaacactcaggttggggcccctgcctgctcccgggagcctttgctgactcctggaccccgttgctccggctgagcgtgggctctttctctaggtctttcctcccaggactctgtgtattcatcctatcgttaaactggattctctacaagagtaataattgcagagtcagccagctctcatcccttttcaggtttcagaaaagacctgtgaacaaaacgccttgagtctgatttagtgtggcaatgccccaagggtcctgttctccctgggtgtcctgcacctggtgcaacgtcggcctggcatctagtgagccatctaaaggaacgatgatgagtgaatgatttgcctaccccttccagtactaggctggaggtcgtggttagggcccatccctacgcaggacatgcaaagtgggaggcactcctctctctacgtcggcagggggcgctgcacagctgcggggcggggtagcttagacacggggcgtccggctaaggccggggacccagggtggtgggcggggtgtcccgcccgcctgtggaccccgcgcagtaactgcgaacatttcgctttcattttgggccgagctggaggcggcggggccgtcccggaacggctgcggccgggcaccccgggagttaatccgaaagcgccgcaagccccgcgggccggccgcaccgcacgtgtcaccgagaagctgatgtagagagagacacagaaggagacagaaagcaagagaccagagtcccgggaaagtcctgccgcgcctcgggacaattataaaaatgtggccccctgggtcagcctcccagccaccgccctcacctgccgcggccacaggtctgcatccagcggctcgccctgtgtccctgcagtgccggctcagcatgtgtccagcgcgcagtgagtactcagcccgccaggtctttggctcgctcgggtgcggaggggcggctgcttgggaagagtgggtagaaactcaagtctgcctaaggagagactggaacagcagcagccgtctcctgcaaagaggaataagaataggggtctcaccgtgtgctaaatagggcatgtctcttttcatctcgaaacagcctgatgagctatcattatgcccacttcgtagaggagaaactgaggcccagcgtgggagatttcctgctttcctgcctagggtccctcagctacaaacagaaggcagatcctagccagttctaaagtcaggcttggccgggtgcaatggctcacgcctgtaatcccagcactttgggaggccaaggcggacagatctcctgaggtcaggagttcaagaccagcctgaccaacatggtgaaaccccgtctctactaacaaatacacaaattagccgagtgtggtggtgggtgcctgtaatcccatctactcgggagtctaaggcagggaaaattgcttgaactcggaggtggaggttgcagtgagccgaaatcgtgccactgcactccagtctgggccacagagtgagactccgtcttaaaaaaacaaaaaaagtcaggctttctcactccactgtttttaaaacactgggtcccaagtctgactcagccacttcaccacctggtctgggtttccctgatcaaaaacatgtaggctttctctgggtgagtgttgggttcaacacccttgtccaagctcatctctagaccctcacagggagctggcttctagccctagaatagagtggcgctttgtaataactcgagtcatctctcaggtgttgaaggaaaagtgttggaaatgggttgagggaggtgggtgccaagcatgaatggatgggtgaaggtggccagaatggagggaaggtggtgcaggcaggccatccaggctgaagctcctccacctgctcctcttccttccaggcctcctccttgtggctaccctggtcctcctggaccacctcagtttggccagaaacctccccgtggccactccagacccaggaatgttcccatgccttcaccactcccaaaacctgctgagggccgtcagcaacatgctccagaaggtgagcctttcctgtcctctccactgtggacctgcaccctccctgaggaaggggcctctgatcctcccctctggtacctgatggaactgcagagaaattgtggaagttcattagcagctgtcaacagcaggagagggaactttacaaatggcccaagtgttaaagagtcctagtgaaattgtgtctccagagaaagcaagagtagtaataaattataatgatgttggttttggctatgtctacactgagtaaagtggatatttgcagtgttcctgtagcctgccaacagagatagaattgtgtcaggtccacatggtttctctggcaccacaccactgatcaatcccggaaatagttacttgggtgcatactctgtgttggggggcaggggtacaaagatgaaatagccttgtccctcctgctgcccaccagcttctacttggtgacacagttccttcttggagcaacacatctcagggaggactatgacagtgcacatgcagccttcattttctagggaagagttacctaattttatttacagcttcgttcttttaggtttcatattttaatgtaaaaaacattgccgttaaaaactgctccagtagctactgctgcaaaggctaaaggctaatgttttaaaagatgtcctctgcctttctgctctctaggaattttttcttgagtattttctagcttgttgccttaggaatatcttaaaataagctcaatgccaccaagccttcttaaagggctcctttcccctttcaatctttcataatgtgctgtgcattgctcctcacaattcaattaatcttaattggacagggggctcaagtgaaaactgctttgtttcccgaagaaaggttcaaaatgggtaacttttaggtgctccaattcatatagatttttttgtgcaaaagctgacacccctactcccagatatagtcctaagggtcaaaagattatagaaatcaatttaatgttttgtacatcatttgtcaaatttgctgtagtagaaaacaaatgaggtagatgcaagtgattcaccggccatatccagggcacaggtttgtagaatttgggctatatgtttattttttagtttgatgccattcaaaaaccaaacatttcaattaagatttcaaaattctagcttctcttgaaaagatctgaagaacaacactggactcacacctccaaatctaactctttataacctgctcagaatagtggggttgcccaggtctgtttaaacacctccgggaatagtgtattcatttcctactgctgctgtcacaaatgtagtgggtttaaatgacacaaatttattatcttacagctctgggcatcagaagtccaaaatgggtcctactgggctaaagtcaatgtgtcagcagagctgtagccctttctggaggctcttggggagaatctgttgccttgctttgtcaggtctagaggctgcccacattccttgacttgtggccccttccattgtccataccagcaatgtctggttgagtctttctcatgctgctccctctggactgaccttctacccgcttctacttttgaggacactgcttacactggattcacccagataatccaggatcatctctctactcttagatcagctgattagcaaattgaatgtcatctgcaccttcattcctctttggcaggtcacatagctcattaccgggttccagggattgggaggtggatgtctttggaggtggagaattggtctagctaccacagaaagggattttactacttgtgcccaaacgtattctgaattttcaggccttgcttcttggctcatgctgttacctctgtctgaaatttccctcctccattgtcgacactttactcctcttaatgtgggtgtcccaactctaggaagctttgcttcccttcctgcccctcctcagaagcttcatgcccttctcaccatgtctcacctactgatgcctcctggtcatttgggcaattgtctgtctcagcagctaaacttgcaatccaggagggtatacatggtcctcttctctgtcatgttcttagtacctaatggagtgcctgccacccattaggctgttgaatggaaaaatgatcgtaatcttcaatcatacagtcctttacttcctaagatacatttcataattttacccaacggtgctttccaacacactaagatgacatctctgtgtatgtgtgtgcgtgtgtgcactgcaaattaaatctcagcttgtcttaagggtttgcatgtttgttatatccatcaaactgtgaccttaacagttccccctttagaagttatacttgaaataggtattcatagaatacagtcactttagcaaaagaagaaacaattttcaccagaagcaagtgtcacagtgaggtgtggaggctggttagcacaggctgttgacatgatttattgtgtttacataatgaaaaaatatgtaatccagagaaacatgccccaagcttagggagaggagggtgagagacagaatgtaaggaatctattttcttttgtattatgaagaaccagaatttcctgcaagtcaaagtgacagaggtcaagggcagccagccggagccttcctggcaccctggcttaccagccttgtggggtgccaggtgcattatcaatgttataaactgagtttctccttcattttttataggccagacaaactctagaattttacccttgcacttctgaagagattgatcatgaagatatcacaaaagataaaaccagcacagtggaggcctgtttaccattggaattaaccaaggtataaaggattttcctcccagagcatgcagtgtggttaaaaactgtgcatcaaatctcacctgcttctaaaaattcacgtttctggtatccatcattatgggattttaactggtcctacttcagaagttagatttgggagaaaaattatttttaaaaaatggttttttttgcaacaatgtgaatacacttaacacttaaaaatagttcagatgctaaatattatgatatgtgtttttaccataataaaaaaaatttgagacctgaagagtcagaaagatttatactaagaattaatactttgatatatgattttttccctctagaatgagagttgcctaaattccagagagacctctttcataactgtaagtcaaaaaatgaaaagtttcagcctgtatgatgaattcatatcactgatgtctgattattttttcctctagaatgggagttgcctggcctccagaaagacctcttttatgatggtaagacacacagctctttcctcaaatgcaatgggggaaatgtttttagcccatctcaatggatacttccccatcttgtcatgtcacccaggccctgtgccttagtagtatttatgaagacttgaagatgtaccaggtggagttcaagaccatgaatgcaaagcttctgatggatcctaagaggcagatctttctagatcaaaacatgctggcagttattgatgagctgatgcaggtaagacttcattctatcagtgagagcacctttttcatgctaaagataaccagccagggtctttgataaagagatataaaaagaggtctggaggccttttaaaggcctgacagacctacattttcaagaagacagccttgagggtgccgtctatagggagcacaaatgtgagcagatcacattatgaaaagcagactccaaagtattcactctgtggtatcccccacactcggcaaatgtttttgtgcattttcttatgtcagcctcaaaacaaccatatgggatctgcacaaaggagggaaccaaaccttaggagagttaaaccacttgtctgaggctctgcctcttaaaatccttcaagaggatttcactacacttaccttctcactcacctctaaaggctccaggacgtgctccaggatttgcatgcaaggggccagtttgcatatctgcaaatattgctgggaaacaagcaagattggtgcctgattatgacccattgtgaaccaaaatgtgaaccaaataaaagaatgacctatcatctggggcatctataatgttattcataggcaagaacttgctttgttatgttctgaatcaccataacacagatgctaatataaaacaaatatttatataagcgagggtgactgctttggtgacgaggacatgggataaaaatatggtggcagaaatcattgtctgaaaagtaattgttttacttttattcttttcgtgtgtgtgtgtgtgtgtgtgtgtgtgtgtgtgtgtgtgtgtgcatgtgccagatttcttgtttgaaaggcaatgagcttcatccaagtatcaaagaatgttagcatctagagagctgtagttgctatttcatttttaggaccaagagttgggtgatttgggtgctagaatcaattctaccagtaaccagacaactattcccaagtcacttaacccctctgtgcctcagtttcctccagtataaaatggggtgactttattctagctttcttttagactttttgtgaggaagatatgaaagtatttattcatcaagggtgcaaatgtaaggttttatattctgttatcaaatcaaagtgctaaacttgggaaattcattgccaggtttatctgacacaaatggcatgtcttcagtaaacaggcctgttactgatagtgagttctgatcaatagcaatccatcacctccctgtgctaaacagaagtgggctttttaatgtaacatatataaaattaattagatattgcagcagatgtcattttaaaggaactgtttctttctaagacacaactcccactgatgattttttctaaatagttttaagggtcttttcagagctcattgaagatggatgtgcttggaaaatgagtatttcttttctcattctgcctggtgatctggctgagagtagatttggattgggtttaggagtggcataagggactgagttgcaggctctgagacatgtactggcttcactcatttttatgaatgaatatttgaattttggaataccatgtaagtcatgcttactgttcattctcctaggccctgaatttcaacagtgagactgtgccacaaaaatcctcccttgaagaaccggatttttataaaactaaaatcaagctctgcatacttcttcatgctttcagaattcgggcagtgactattgatagagtgatgagctatctgaatgcttcctaaaaagcgaggtccctccaaaccgttgtcatttttataaaactttgaaatgaggaaactttgataggatgtggattaagaactagggagggggaaagaaggatgggactattacatccacatgatacctctgatcaagtatttttgacatttactgtggataaattgtttttaagttttcatgaatgaattgctaagaagggaaaatatccatcctgaaggtgtttttcattcactttaatagaagggcaaatatttataagctatttctgtaccaaagtgtttgtggaaacaaacatgtaagcataacttattttaaaatatttatttatataacttggtaatcatgaaagcatctgagctaacttatatttatttatgttatatttattaaattatttatcaagtgtatttgaaaaatatttttaagtgttctaaaaataaaagtattgaattaaagtgattctgcaatttttctaatgtacttttaagtgttaaaatatacattgtgggaaaattgaaaactctgatgagacttcaacaaaattactctggaaagaatgccacaatattcttattcctttcctagtccctttcatctcattttaaagggaccctagtaagacaagatatgctttactactaaggcagccaagtgagtcatggtttttgagggtttattatttttgttcaacataagactaaaagtatgctgtgcattagaaaaatacttcatagtattcttcaaccagaaaaaaaatgtcactaagaggccttctagcctaattattctaatttttgtgaccctttgggctctgagagaaaagttgtctctaatttgcaaccagaaaatctctccatttgtttaaaactgtatagaacttttgcctgaaccacatggataattgccttactttggcttaagagatgtgctcttaatgagctaaatgttaaattccatctttttaattctctaaaccaggagtccccgatccccaggccatggagtggtactggtctgtggcctgttgggcagtgggccccacagcagtaggtgagtggcaggtgagcaagtattaccacctgagctccgcctcctgtcagatcagtggcagcattagattctcataggagtgtgaaccctattgtgaactacacatgcaagggatctaggctgcatgctccttataagaatctaagtaatgcctgataatacgaggtggaacagtttcatcccgaaactatctttgccccctgccccccgggtctgtggaaaaattgtcttccacaaaaccagcccctgctgcccaaaaggttgcggaccactgctgtaaatcatgtaaatcttaggtttcatgacttagttcattttgtactgctgtaacagaatatctgagactgggccatttgtaaagaacagtgatttatttttttactgctctggaggttgggaagttcgagaacaaggggccaacatctgatgatggcctttgtgccccatcatcatatggcggaaggtgagagagagagcaagggggtgctgaacgtgtccctttataaggaatccactcccatgataacagcattaatccattcatgagggcagagtcctcattgcctaatcacctcgtaaaggtcccacatctttatactgttacaatggcaattaaacctcaacgtgaggctgggtgcagtggctcactcctctaatcccagcactttgggaggccgaggtgggtggatcacctgatgtcgggagtttgagaccagcctagccaacatagtgaaaccccatctctattaaaaatacaaaaattagccaggtgtggtgacgaacatctgtaatcccagctactcgggaggctgaggcaggagaatctcttgaacccgggaggcagagcttgtagtgagccaagatcgcaccactgcactccagcctgggcaacagagcgagactccgtctcaaaaaaaaaaaaaaaaattcaatgtgagtttgggagggggacacaccacattcaaaccatagcaattcacctgacacaatacaatttaatgttaaggctttgataatccattcctccttaatagaaaaaggacctaaaatacaaaatattttgagtgacccctttcctcagttactcctcccaactgaatcccaatctttctccctgtaaatgtgttatctccttcccaggtcctcctgcatggcaaacattctcgtttttcaaattcttgccctattagacattcaataaaatagaaaccatcagaagctagatcccatcacctatctccttctcttgagtgattcttccacaatcttgaatggtccacaagtgcttcacagacatgggtttctttcaagtgtcgagtctggggtctcagcagctttgacagtgaggagagacgaacggggctgtagagttgcagccacccctcacttggaatggtgactactggttgtctgggcccagagatcaggagggacaagcagacggtctcttccatggactgggtttacacacaagaacacgtgtgtttcttctgttctagaaattagcatgggatatgcttcaaaaacatgactggccacagaaacagcttcatggttcattccattctttattgcatggttagtttttcactttttttaagcctgtgtctgcagtttacaagtagtgtagtatgcttgcaaccaaatcattccaatgctccccattggtctcctcttctgaaaaaggaaggtaatactagaatctacctaaaaggatcagagaaagggtaaaatggaacaactcgtgcaaagggctagcgttgcacctggcacatagtaagtgcacaataaatgtaagcacattttgaaatgtattattagtctttgggctaagcacctgcaccgaatttgttacctcctctttgctgctatttcctcattgatgaaattcagaaaacggtgggacctaattaactgtgttattgtgaagattaaatgacacaatacagtgccagcacctagttattactcaacataaatttgtcacagttctcacaagacatcagaacacccgctgatgtgctgtcccccatggcactcagcatattaagtgtggtcggcacaagcggctgcctggtgtgaagtatgagggcaaaaggcagggtctctgccttccaagaacaaagggtggagagcaaagtaacttttttttttttttgagacggagtttcacttgtcacccaagctagagtgcagtggcgcgattcggctcactgcaacctccaccctccaggttcaagcgattctcctgcctccgcctcctgagtagctgggattacacgtgtccaccaccatacctagataatttttgtatttttagagacagggtttcaccatgctggctaagctggtctcaaactcctagcctcaggtgatccacccacctcggcctctcaaagtgctgggattgcaggcatgagccactgagccaggccaggagcaaagtaacttatcaaaaccaaggaccatccccctaaaaataccccccagtcaattggagattcgtttgattaacaaactactttattcaaaagaaactaaaccttgaaagtgtatctcacacctaagaatgactaaatcagagaattaacatgaaaaatatttagttgtcagctgccccattaaaggtccaggactttgggaagacagaacagttctaggacatggtctggccagacatccaaaggtaagtattgaaaaactcaagagatgtaaaagacccttagacacccaaaggaggataagaaactacagacaaaaagaaaagaacaccagctttgttgggggccagcacccacagccatcataagtcctcttctctgtgtcacactgggccattcagttattatccttatttgaggactaaacattttgggccgggcgcggtggctcacacctgtaatcctagcactttgggaggccaaagcgggcggatcacaaggtcaagagatcaagactatcctggccaacatagtgaaaccctgtctctactaaaaatacaaaaattagttgggcatggtggtgtgtgcctgtagtcccagctactcaggaggctgaggcaggagaattgcttgaacccaggaggcggaggttgcagtgagccgatatcgcaccactgcactccagcctggcaacagagcgagattccatctaaaaaaaaaaattaaaaattaaaaaatacttttggttctggctagcataatttggcttcctagtttaaagcaaactgcattacaatatgataagtaagaaaaaaatatggccgcattgtccaaaaattgaattctatgtacttgaaatattttatttaaaaaagtgaaataggatgcgtataaatgttttgaaatatatgtggtgagaacaggcacaaaaactttagttatatttatgtatctttcaattttacattaaaaatatgagtatgaattagatctatgtaatatcaaaaacagtatattaatggaatctgttttagacaaaaaaaaagtagtagcaactgctcagttgtgcttcctaaatgccaggcatgttcctaagagtttaccacaaataaacataaccatcctaataaccctttttatggatgtggaaagtgaagaaaattattgaagttgaccaggtgcggtgactcatgcctgtaatcccagcattttggaaggccgagatgaaggattgcttgagcccaggagttcaagaccagcctgggcaacatggcaaaatccccatctctacaaaaaataaaaataataaataataagattatgtaagctcacataattaacattttaagtggcctggtctcagcctgtgccagcagctatgctcatgttgaagtcactgtctaagtcaagggaatgctttccctataaccatataaatatcatcccaattatttatgtatctcccttctctctcttgctaaactgtgggaacctcagatataggcaatgtagtattacccacgtatttgtgttcccagccccaggaacttaaaaatgatacagaaacaaagggaatcttcatgagcccccacaattctcatgtcttttcctaatctagatagaaataaagaagtctcagccaggtgtggtggctcatgcctgtaatcccagcactttggggggccgaggtgggcggaccacctgaggtcaggagttcgagaccagcctggccaacatggtgaaaccctgtctctactaaaactacaaaaattagccaggtgtggtggtgtgcgcctgtagtcccagctactcagcaggctgaggcagggaattgcttgaacccaggaggcagaggttgcagtgagctgagatcgtgccactgcactccagcctgggtgacagagcaagactccgtctcaaaaaatacataaataaaaataaaatttaaaaaataagtctctagtctttgaaagaaacttattcacaattataaaaataaagagttaaaaaattgaaaatgcatatgcttacttagttcaaaataattatacatgttcataatggggaaaaatccaaattcataaacgttttgatttagttaacataatttaaatacctgtggtctgagtatatgtctatgcttcagaaacaacgtgccaataaatattccacacctaggggtgggaaagtgttttacttcccattaggttgcagatgtcttagaaacacattcctgcaccacagcttcaagaaatccaaataatgacctgatctgctggtttccaagctaccctaccaggagcaagtcagaggccctgcagggctcctcggtaagccctcgaaatccctctcccctcaatgaccccaccacagcagctccacttttgaatattttaccagtgcgtgttccaggtaagatttcctttcacaaaaggttttcgtgggtaaggaaaaatgaaaacttgctgaattactctaagcccctctctccagttgtttttataatggaaccacctgttgatttccaggcttgctcgaaaagaaaacactgctataaatgcatagagcgtcttcccttctgaaaaggaaacttgtgctagaggttacagaaaacagcaagaatgggattgcaaagaataaaggtggctgactaactctagacttcctaactgaggacttacatcaggaccagaacaaattaggtctaaatctacagtgggctccagggtggaaatggaggtctcacttaagaagcaggagaaatctcaaaactcagagcctagaatttaaccccagggcctccgtgttagcatcagcggctgcagagccaggatcaggacttctcaaatcctgacatatagacagggaggctgagaacacctgtcaaccaaaaacacatgattccagcagtgaatccctgggatcaagctcttcagcaagcagtgtgctggttcaccctaagaaggacttccagaaaacgggtagtggcctaggctgactgctggaaaccacgattctcatgggaacaaattaaaaattcagcaactgctgtgttctctttagagaatggagtgaagcgtgctttctcatgaaaaagcagcgggaggaaacttttccccgaaaggaatacagcaaaaggaccaaatgagagtcattatgtgcagaaaaatcccttgtcaagagaaatgcacaaatgaggaagtattaggaatctgcctggttttaaataaaaacacaccttcccatccttggaagggagaaaaccataattattcctgtggcaaaagggctgtggggacaatgcaggttgtcctgaacctgtgtgaacacctggtgaactagtttaccctgtctggcactcactcagccttggcccaggagccaaagagctgggatcaaaaccaactattgccaaagagccaaaggaaagacaaccaaggaataggatgctttaaaacaggacctgtaagtaaataatacaaagaagagcagtgtcaaaaagcagacttccttttcttctcatcatccatgatttatgaatttatggatcaaataatgtaaaatatatccagaatattaatcacccaccacactcatgatgctgaagtagtgacaatatctacacagaccaaaaaaaaaaaaaaaaaacatttcaccaattagcagcagccaatgaggcccattatttcctgaggcaagtctttttcaagaaaagaagacagctttcccttggttctgtgaaagctatctctgagtagcattcttccccatgaaaagtaaataattccaccgtgaaagtccaagaaaagtagtgtttggccagttgtacttctccaggggatgaggagctcacctttgagcttgcatcccaaattgctaggtgggagagaattgcatttgtttctaatctcttgaggcttcagcaccccaagactagagagtagaaaacctcagtggtcctccaggcaaagtgggcccgggggttcagaacgctcgctcaccatgtctgaaaagcatgcagagagatcatagtactttgacttctgatataaccttctggggtgtttatgtacttattttttttgagacggagcctcgctctgtcatcaggctggagtgtggtggcgtgatatcggctcactgcaacttctgactccctggttcaagcgattctcctgcctcagcctcctgagtagctggggttacaggcacatgccaccatgcccagctaatttttgtacttttagtagagacggggtttcaccatgttggccaggatggtcttgatctcctgacctcgtggtctgcctgcctcggccttccaaagtgctgggattacaggcatgagccaccgcgcccggccaggaataaaaaaatctaaatagaattttaaataaaacctctctctgaattactgaggattcttagaaaaaaaaaacactatattcgttgtagtaacaacatataataatcaaagtcttgaattgatttgagctcagttatgacaatgtgctacatccatccacacacatacaaaattagaagtgcttgaaaaccaagacaaggaaccctgtggttttctggatcaacaccaggaacgatcccctccagccctccctgggctctgctttctcccttgccctctttgctggttgaatattgctggcgccacccagtggcccccatgacccctgcttcagtgccacagaaggcccagaaggctcaatgctaccagccctgccttaagtaccagggtgacatgactgctcccttactgagccagaccacctgcctggatcttgacatgcatggtctcctttcattctcaccacagcccaggacataggagggtctgaacccatttcacagatgggaacagagaggcttcaagttaggttgagattttacttacagtcccaaagctagggcagcactggggctgggcttccaacccttcctctgactcagctgcacacaccatccttactaagaggacagcagccccttgcctgcttttgcatttgcataactctctgaacccaagcttataaataaccaagccacatgttctatagctattcccaaagacacagcttgattccagacaaataactaagatataattttctgctcaccttccaacacatcttggacttcaagagagatgatgtctttcaagcacttacataaattctgggctgtggcaaggctctgatccttttcttgccacttcttcagcatcctaaacttgcagatggtaacatcttctgccctcttccagatatcatcagttttgataactccaactccagattggcagtggcaggttttgttttgttttgttttgtttgcaatggcacaatctcagctcactacaacctccgcctcccgggttcaagcgattctcctaactcaacctcccaaatagctaggattacaggcgcctgccaccatgcccagctaatttttgtatttttagtggagacagggttttgccatattggccaggctggcctcgaactcctgacctcatgatccgcccgccttggcctcccaaaatgctgggattacaggagtgagccaccgcacccagctggcagtggcagtttttatccactctttcctcaagtcgccagcaagggtaatcaaaaaactgagtaactgttaagggggtttcgtctttgcttcatctaaacacagatgatgaattcagtagttcctctgaacatttcaatcattaatagatacttacaatgaaaatatactctccttattaaaaaaagtatagcattaattgttacttctctcacttttaaaatatatttaaatgttccccaatcactgttttccaatcaattttaaggactaaatggtaccatttcatataacataccactgttagagtgtaatgttcattcacagtgatagttccaataataagactgttttgaagacagcacaaattaggttggaattttgaaaaattcagacatcaaaaataattcaagtggcttaaaaagagaaagatacagttttggtcttacacacctgtctttatctaaatgttagtggcacaccaagacacttagtgacctcagtgaccactaaggagaaaagcaagagatctgagctctcatctccattatgccacttcctggttttagggggaaatgcacatttcaaaaaaaagcctcatgggatggtaatatctgttttatatctgatttgtaatgtctgctaatttcttagaaagtgtcatacacttagaaggtgtgatttttgtgaaatatacatttggtcttccttatcttttcctggcataaagctcctaaaatccttggaatctaaggagtgtttagagtgtatacgctaattatatagcataattatatattagcatataaaggagtgtatgctaactatattactagatagcatatataatatagcatgtaattatagatatatatattatattattatataacataataatatatactatataattagcatataatcctttatatgttaatgaggtgactggtagctgagggcccctggatagcttcaggttaggagtgggtcacagtaaaaaccaaggctggattggaaagttaggattttcagctccaccccataaccagcagatagggaggagggctgaaaatggagttgatcactaacggccagtgatgtaatcaatcatgcctacaaattaaagcttctataaaaccaaaaggacagggttcagagaggttccaggtttgcaaatacatccacatgctgggagtgtgtgcaccctaactccacagggacaggagctccagtgctgggaccattccagatagctccctgagtatctttccatctggctgttcatctgcatcctttattatatctctaactaataaaccagtaaatgtaagtaaagtattgccctgagctctgtgagccactgtaacaa

SEQ ID NO: 1384 - DNA, 1607 bp, Homo sapiens
agacacggggcgtccggctaaggccggggacccagggtggtgggcggggtgtcccgcccgcctgtggaccccgcgcagtaactgcgaacatttcgctttcattttgggccgagctggaggcggcggggccgtcccggaacggctgcggccgggcaccccgggagttaatccgaaagcgccgcaagccccgcgggccggccgcaccgcacgtgtcaccgagaagctgatgtagagagagacacagaaggagacagaaagcaagagaccagagtcccgggaaagtcctgccgcgcctcgggacaattataaaaatgtggccccctgggtcagcctcccagccaccgccctcacctgccgcggccacaggtctgcatccagcggctcgccctgtgtccctgcagtgccggctcagcatgtgtccagcgcgcagcctcctccttgtggctaccctggtcctcctggaccacctcagtttggccagaaacctccccgtggccactccagacccaggaatgttcccatgccttcaccactcccaaaacctgctgagggccgtcagcaacatgctccagaaggccagacaaactctagaattttacccttgcacttctgaagagattgatcatgaagatatcacaaaagataaaaccagcacagtggaggcctgtttaccattggaattaaccaagaatgagagttgcctaaattccagagagacctctttcataactgtaagtcaaaaaatgaaaagtttcagcctgtatgatgaattcatatcactgatgtctgattattttttcctctagaatgggagttgcctggcctccagaaagacctcttttatgatggccctgtgccttagtagtatttatgaagacttgaagatgtaccaggtggagttcaagaccatgaatgcaaagcttctgatggatcctaagaggcagatctttctagatcaaaacatgctggcagttattgatgagctgatgcaggccctgaatttcaacagtgagactgtgccacaaaaatcctcccttgaagaaccggatttttataaaactaaaatcaagctctgcatacttcttcatgctttcagaattcgggcagtgactattgatagagtgatgagctatctgaatgcttcctaaaaagcgaggtccctccaaaccgttgtcatttttataaaactttgaaatgaggaaactttgataggatgtggattaagaactagggagggggaaagaaggatgggactattacatccacatgatacctctgatcaagtatttttgacatttactgtggataaattgtttttaagttttcatgaatgaattgctaagaagggaaaatatccatcctgaaggtgtttttcattcactttaatagaagggcaaatatttataagctatttctgtaccaaagtgtttgtggaaacaaacatgtaagcataacttattttaaaatatttatttatataacttggtaatcatgaaagcatctgagctaacttatatttatttatgttatatttattaaattatttatcaagtgtatttgaaaaatatttttaagtgttctaaaaataaaagtattgaattaaagtg

SEQ ID NO: 1385 - protein, 164 aa, Homo sapiens
MWPPGSASQPPPSPAAATGLHPAARPVSLQCRLSMCPARSLLLVATLVLLDHLSLARNLPVATPDPGMFPCLHHSQNLLRAVSNMLQKARQTLEFYPCTSEEIDHEDITKDKTSTVEACLPLELTKNESCLNSRETSFITVSQKMKSFSLYDEFISLMSDYFFL

SEQ ID NO: 1386 - DNA, 1532 bp, Homo sapiens
agacacggggcgtccggctaaggccggggacccagggtggtgggcggggtgtcccgcccgcctgtggaccccgcgcagtaactgcgaacatttcgctttcattttgggccgagctggaggcggcggggccgtcccggaacggctgcggccgggcaccccgggagttaatccgaaagcgccgcaagccccgcgggccggccgcaccgcacgtgtcaccgagaagctgatgtagagagagacacagaaggagacagaaagcaagagaccagagtcccgggaaagtcctgccgcgcctcgggacaattataaaaatgtggccccctgggtcagcctcccagccaccgccctcacctgccgcggccacaggtctgcatccagcggctcgccctgtgtccctgcagtgccggctcagcatgtgtccagcgcgcagcctcctccttgtggctaccctggtcctcctggaccacctcagtttggccagaaacctccccgtggccactccagacccaggaatgttcccatgccttcaccactcccaaaacctgctgagggccgtcagcaacatgctccagaaggccagacaaactctagaattttacccttgcacttctgaagagattgatcatgaagatatcacaaaagataaaaccagcacagtggaggcctgtttaccattggaattaaccaagaatgagagttgcctaaattccagagagacctctttcataactaatgggagttgcctggcctccagaaagacctcttttatgatggccctgtgccttagtagtatttatgaagacttgaagatgtaccaggtggagttcaagaccatgaatgcaaagcttctgatggatcctaagaggcagatctttctagatcaaaacatgctggcagttattgatgagctgatgcaggccctgaatttcaacagtgagactgtgccacaaaaatcctcccttgaagaaccggatttttataaaactaaaatcaagctctgcatacttcttcatgctttcagaattcgggcagtgactattgatagagtgatgagctatctgaatgcttcctaaaaagcgaggtccctccaaaccgttgtcatttttataaaactttgaaatgaggaaactttgataggatgtggattaagaactagggagggggaaagaaggatgggactattacatccacatgatacctctgatcaagtatttttgacatttactgtggataaattgtttttaagttttcatgaatgaattgctaagaagggaaaatatccatcctgaaggtgtttttcattcactttaatagaagggcaaatatttataagctatttctgtaccaaagtgtttgtggaaacaaacatgtaagcataacttattttaaaatatttatttatataacttggtaatcatgaaagcatctgagctaacttatatttatttatgttatatttattaaattatttatcaagtgtatttgaaaaatatttttaagtgttctaaaaataaaagtattgaattaaagtg

SEQ ID NO: 1387 - protein, 253 aa, Homo sapiens
MWPPGSASQPPPSPAAATGLHPAARPVSLQCRLSMCPARSLLLVATLVLLDHLSLARNLPVATPDPGMFPCLHHSQNLLRAVSNMLQKARQTLEFYPCTSEEIDHEDITKDKTSTVEACLPLELTKNESCLNSRETSFITNGSCLASRKTSFMMALCLSSIYEDLKMYQVEFKTMNAKLLMDPKRQIFLDQNMLAVIDELMQALNFNSETVPQKSSLEEPDFYKTKIKLCILLHAFRIRAVTIDRVMSYLNAS

SEQ ID NO: 1388 - DNA, 27898 bp, Mus musculus
  misc_feature (1)...(27898): n = A,T,C or G
actcacagaggtcctcctgcctctgcctcccgagtgctgaggttaaagatgtgtgccaccacatccagcctcctgcacacaatacaactacaatccttcctctttccgctccccctcccccagatacctaggagcactctgtacacaccagtgatgactctgatggaagtactcacgtctgtaactgcctcccaaagagctgtgtgaccctttgccatcaccctccctgccagttctactcctggcccaatctcagtcagccactgagccatctcttgtcattacagattagactgatctattctacagccaagtccccttttcctgtggggcaatagatgtctgacaccagccctccctcacccccctaaccccctgccttgccatcttctagtcttatagaacattccagtgtgtcctgacacacagggatcatgtctatcaggggagggttctgctgaaacaggagactgtgagacggagtgaggcttcgggggagggtcgtgagtttgtcctcagcctagcagagaggggttggcatagaaggtgactaagcgtagcctacagttggagaaatttcacttcaagctgtgcaaggggtttggttccttctgatgctgaccgattaagccctgggtcttcaaccttgatctctttgttttggggtgctctcacccagggcagaacttagcttgttctggcttcctgcaggagtgggttgctgtccaaggaggggctatagcaagtcacttactgagaacctgacagcttgtgtactcgctggggtcagagatcaccgagtagtcaggagtgacggccagacaggctgaggaagtttccaagttgactcattggaaagatgttgtcctcagacagagctgaaagcctagtacaagccagcaaaggggcaaacagccaaagtcactctctggccagtcccatgcaaggtggtggcaccttccatgtggactgaaaagtgacacatggaaacaaacagctgccgtgggaacttcccaacagaggtgacacgagaaagctcctgctgccccagctcctgccagcaggagcaccacgtgccacactgtggagggaatagctgccaccctcagcaagcacagtcacacaagcatgacgctccctctggggagcgtggcagggtttgagtgggacctaccaggacagtggaaggcccgcgtgtcagtaagcagtggagagaacccactgggttgcaacttgctactatgggttgttctaagagccactatgaaacagctcatggaaagtctctctgtgtgccagacctgccagccaccaagcactttaaaacaaaatctcacttaatactaaacacgggcagtatattcttttttcctaggggaggaagtggacgcctgtgacttacccagggtcaggggtatactgggatggggatttgcattgctgaaagtccgtctctaaggcccatgctctgcccgggtaaggcctaaagacaccagtgactggagagctggtgctacacgttccccctgtcttcacccacctctgtctcctttccagccccattctgagaaatagccacacttgcttgaagctctcacctcctcctcttaatggaatcccctccgaatcctgtttcctcatgcatctcctgggtctctctgtggcttcctccctccttatctacagcttggctttcccaacccaaagggaatccctacaactgagcctgcaggtgcaggcctgcagcctcagggctccctgggattcccctttatcctcaggttaggtagggaataccctatctctcagccactgtaagtgccccgagcctgactgctctctaggcggcagctcttggtcaccaggttaggttgggaaatggccttacagaccaggacaggttgagatgagcctcctttgcactgactgaaccgtaagcggggccacttccttcaggacaccagccagtcatttgcctctctgactgagcgcctgtcttgcccttccctcttctgcctggaggagtcagggagcttccagctctccggcccttcacatggtgattcaggggtacacagttaaaccctgggctcattctccacagcctgaactgaaggaactgtacccagatctgggccccgatttgcagcttcttgacaattcattcttcaggaaattccaagcactgaaatgtgacctgctaaaacggaactctgtgtccttcctgcaaaccctgatcaggcttagatcacacacacacacacacacacacacacacacacacacacacacacactgtatgcacgagacctccatcctggcagaccctcatacccactacctactccctctctgatggtccaggttcgggcttgtcagtgaccaaacttgatctgggtctcccttgaagcaagaaaagaactcactggagggaaatggaagctttagcagttcacagaccggaaggaaaggatcagccctaacctgcctgagggatagaactcaaaaaacagagtgcagccacaagtgaaatcaggaccatgactgactgctgagaagtgaattcttagctcagtgactgagcgatggattgagcttgtctggtgcatcgggagtcctgggggaggggggggggagtgtatgattgcctgggcattgggagactagacctgggcaatcaactagtgattcttaattttcctaacagtgcctaccaccacagctcctgatgctgaaagaacggctcacctctttaccacatgtacacacacgtgtgtacacacacacacacatacacgcgcacacacatcccaaagagactgtttctgaaatggtctcatgtctattcctagtgggctgccccaggcctcagtatttctctcgaggaatgggtaatgcagggctctcaagctattgtcttgttacacactctggctttactactttctaactgtgtgttgtcaggaacactgccagcttctctgtgcttctatacgcaaaatgaagacaccagtatagcctagctcctacgctgattttaatagtgaaggaagggccttattgaacacaaagggcttcaagtgagcccgggctgaaaaatgcttccatacacatgagctaacactgttattattccccagacactggccactatccttcaaacctctcccagttctgtttcccttttgcctagggaaacagtcaaatccatcctgtaggcttgtttctgaggccagcctggggtggcctgagggctccttctccagtccaatttaaaatgtcccagctcaactggggctggataggtggctcagtggttaagagcacttgttgttgcaaaggactcaggcttgattcccagcacccacgaggcttaccttaccacctccttgggcactgtgctcccatgcatgcaccatacataataaaattaatctaaaaatattattttaaaatgccccagcatatttcagctcagactcctttcacaggaggaccatcccagagtctgtttggcacattccctgacagagacacacacacacacatacacacacacaccccgctgttcacttaaccttgtgttctactgtatccttctgctccaacctctctgagtagttctggtccctaccttgtgccaccccagctgtgtctcccgcctatgtctcttgtattatccccaccattaggaagtccatccacactcctgtttaacagcttgcacagaccagtgtccagcatactgttagtgctaaggccataagcaggctagggacagacaaccagagaggaggcaggaagaacagacaggggagagacaagcatggctccatgggacagacactctccccatctcccccacacacaccctccccccattcccgcaggtgccagaccagacagtggagctgctagagtccctctggttatgtgctgttctttcccatggcaccacctttcacaagctttcctgccacccactgtctgccagactgtgaccctgatctcttgttgccatggccctaggggatctgtcacatccttacaatacaacaactcttcatgctcgtgagcctacccctcccaccatacagtgttctagagactccctcttctccgggagaagtatccaatcagcctggaaaggctaggaccacacgctgctagaggaagcctcctcgcccaggcatgccaccggccttcttccagtcaacagtttattcagttcctgtttttccaggaagagagcattcttgcctccgtttcacaagcagggtctgaggagacaaaagcagccatcgaggttcagaataaataactttcttcagtttccacagccaagacacaaactcggactccttggcaccatcttctgactcacgtggccttgccaggtgccctctgaatcacggttggtctctgagtaggttcctaatgcacaggtgagcactatcaggacctccgcccacttcagctgaaggccaggctggctcaagctctggggacagagtctcagaacccatggcaagaaggtcctcctgtcctaggacctcctatccaagcctgctctttcttctgcatacccacaatgctctggttctggggcagagaccctgctctattcctttccttctctgaacacaggctctctgttttctcgtggcagctttctcaaggcacttggaggcctttctttcactcctgggaccttggatatgggcagtgggcagaaatagctccttagggcataagctccacctggggctaagacccaaatagcacctttcctatctgcacctcattctccttaattgcacaggagctctgcctgaagcagtgtttgtggtgtccccaaaagacccaagacatcaaaggcacaggtgaacaataccatcataaacaaatataagagctacagcaaatataagagcttccaccctggcctcctgagcatcaagccgtaacctctcagggtgtttgccagagcttgtgcatttcagaggcagcttccctgagtgatgttctctgctcttccaaactttccacagtgatcatcttagccataattggaaaaatattatatggttgctcacacctgcaagcccagcctcctcagagaatgaaacaggagggctgaaagttcaaagttagtctgggctacataaagtcaagggcagcttgggcaatctggcaagatccttggcctcaaacaaaatagcaaaaagggccggtggtagaaagctcgccaggtatgtacacgagaggctttggtccagcactgaacagctgaggccagcctgaagcctgcaccaagccctgggagagagtgtgttctggggacccttgccacctttccttcccatggtccctgaagcttgaaggtgttgtgtgactcctcctcagaaggggtgagcacctagtcataccagactgagcggcactggcagtcctgtgcggtgaaccaaggacttacaggagcgtgataaagggttaggagacagagggtaaccccaaaacaactgcatcaccaaaacaagcaaacaaaaaccagaaaacaacaccccagcatgagaaatcacctcaccaaagtcccttttttagttagctttctctctcctataatcgctaacatgcaatgcatgcacgcaagcacacacacataaagaccagagaccataagcgatggcaggattacatacactgagggtggagggcatacaggaatccccgggtctcacatgaggagttaatgagcctgcctccacctcccaacttcctacaggggagactaatatccctgatcctgtcagagggccttgtggatacggttagccactctgatttcaagaaggtaaacgaccatccgcctgcctctgcctcccaagtgctggaagcaggctaatttctgagtttgaggccaacctggtctacagagtgagttccaggacagccagggctacacagagaaatcctgtctcgaagggggaaaaaaaaagaaaacagaaaaaaaaaaaaaaaaaaaagacaactctgtgggctggagagatggatcagaggttaagagcactgactgctcttccaaaagtcctgagttcaattcccagcaaccacatggtcgctcacaaccatctgcaatgggatctgatgccttcttctggtatttctgaagacagctatagtgtactcatacatataaaataaataaataaattttaaataaattttaaaaaaagttaaaaaaaaaagacagctctgagtgcggtccccagctgggcgcccatgcactaatgcagccttctcaggcatggtgtccgggtccttcacaacatgatccctacaccagcgcctgtctcctctcctaccatgccaccagattaggaggctgtggtaagtggacggtgagtttaaagccagcccatggacaccagggaacgtagaccagtattagagggtttgtctccaatgatgggattagaatcctggtcctctggatgggcagccagtgattttaactgctatgctttgtctccagccccttaactcatgcctgtaatcccagcattcaggaggcagaggaagacagatctctgtgagtttgaggccagcctggtttatctaatgagttccagaacagccagggctacatattaatgataccctatcttaaaaaacaaacaaacgagccaggcgtggtggcgcacgcctttaatcccagcactcgggaggcagaggcaggcggatttctgagttccaggccagcctggtctacaaagtgagttccaggacagccagggctacacagagaaaccctgtcttgaaaaacaaaaaaaacaaaaacaaaccaaaaaaacaaacaaacaaacaaacaaacaaaaccccagcaagacaacaccctcattagaagctcgtttctttacccccctgtatgtgcacacatttactctgtgtacagatggtgagagactgtagactttacttttctaaattaccttcagagtgaggcagaaacgctccaaattcagggcccactgttctactgcctcatccaaggacccagagatgccctggggtctgaagcatccagtcaggctgctgagtgttggtggctgctctagtctggaaaagttgccttcggctaggcagtactctctgtgggaacaggatcgccccacccctacccagcacacccagagttaaccctacccccaaaaaattcccagaagaaattcacagatgggttttccccagacagacagctcatacatatttgccacttagcacagatgtttgcctggggatggagtgctgagagacaacgcaggtacacaactttagggtaacaggtagccccaaacaaagccagacacgccggggcgagctagaactgagatgcccaggaggcctagattttattctgtgttctgaagtccttcctattgtctgtgtccgcatctcacagagccggaaactctcctctctgcccaccaggcggcgcagcggttccaggagcactgcgaatgtgttgcgggactgagtctcagcacttagcaagattgttttgccaaacttatttcctttactactcaagtccaggaaaacatgtgcccaaacgtaagttcactatcgacttcaggactcccggagggagaagactttatcttagcctcatccttgcggcctaaggtgcaatatccagccaaggggtagcctaaacagatgagctacctctaaaagcgcaaaaacatggataggatcaaggcctgaagtgaaaatgctggagatcatcctaagccagaggctctgcgtccagtcagtgcccaggtttcagccaccctctccatccagtttgctccagcctcacactcaggcaggcaggaggtgggcacgtcctccctaggctgagcggagggagattggctgccagcagaggtgatccggaccaaagccatcttccccgggggcaattttgggctattttctctaaagatgttacactatctaactcctctttgagtttcacagcagccacaagtttgcacctttagagtgagtgatattactcaacaatgaccggctactgttattgcttgcgccgggcactaagcagagaacagaaccaaaccctatgaagtaaaggaaccctcgtggtgtgtgtgggagactttcaccttggtgttcctccaggtgagcaaaaagcgcgtgaggtgcttccctagggcagcggataaacttcgaacccggaaggagggacgagccgcacgcatgggactcaggcacgtcgcctagggcaggttgcgcaccggtggcgtatgcttgagtaaagacggaccctgaccctagtgcggggttacggggcgcggcacctagttggagctcagtaaatatttatggtgagagcgacaagcagggcccacctcctaggagggaaggaggaaagccagagccctcctcaattcctggctcctcccctgcaggctcagcaccgagctggccacggcgtcctggcccgatgtaattacagggtctgccgccaagcctggccgtaaaaaaccgggatgaaacggcctggaagcctcggaagctgggccggaccctgcaaagagccccgggtccgcgccttgccctgatgcgcagccgcaaagaagagagaccagggacagaaacccccgcccatcacaccctgcaacgcacacgggctcaccgccacacacgcaaactaccaagcactcagcttttgactttacggctccaagaatgcactcgagcctaatcaaacacctgcccgccagctccatctcaggcgcagacgccgccaacccctctccagacagctgctgattcgagaggtgaattcctgcagggttgtttacatggagagggggaggggttctgagcctggtactgagagcccaccgactggaagacccaagtcagactcagtcaaacacagccgcccaaactaccccccactccaatccacccccgctgcacgcccaaacacgtttctcctcttcttcacacactgttcacaaacattagcatatgtatgtcaggcgtttcacacgcttccacacacaagtgtctttacacctacccgccatcacacgcatttacacacgccatatgtacatgtgtcaggtcggttagtttgtcactcttcatgaccatattcccacattccatctgcaagcgcgcattcgctcaagacacacgtgaaatgtataaacaggtcattagcgtacgttggcgctattgaaaatattaggaacatccccccctacagcccctgagcccaactatgagttctcgcataaagtactgatggactgagtagcccttagccctggccgcacacgttacacgctcgatcacacacaacgtcgcactttattcccggcatctaagcgatgacacaatctcttgaacaaagacaacattgacaaacccaacaaaaacaaacagccgcgtctgtgtggggaggggcagccaagccagagtcaaggcatgggggagtgttgctgggggggcggggggaggagggggtcacgagagagtgtgagaaggcgagtgcgcgggcctgggtgtgaatctcaggaaaggtgtggttatatccccccacctcacaccctgacaagattggcgccccgcgctgcaaagccaagtcctgaagccactggttcccagacccacacgtataagttcttccatttttccagcttgctatggctttcagtcccacaaagccaacagagcctcacatagacacccccacccccacacccgtaagtgagcacacacagctatgggaggatctgtgcagaccccggagcgctctccgtcgctgagatatgggagtccttcctcccagagtctttttcccttcctccacctccaacgtagccatcaagccctggggcagcgcgcgtcgggcggggcgagggcggggctggtgttggcggcgccagcccaaaaggcggagtcgagcagcgaagaggccagatttgtgatcgtggtgcctactgtaccgtggagaagcctgtgggaaccttacactgcagagctctcgtcctggcctggctcggcccggccccgcgctatggagttcctttgggcccctctcttgggtctgtgctgcagtctggccgctgctgaccgccacatcgtcttctggaacagttcaaatcccaagtaagccctgagactccctggcagcctgggtgccgggttggcaatggcctttcgcagggtaactgtccctgccaacccctggcctgcgcctaggagaggtggccagggatgggttggactctatagctccccacctccgtctgtatctccccttactacctggcaacagccgaccagggcagaaacctgctcatgcctgctcgcacaggcgctggctgtttcagccctctctttctgccctctggcatctcatcactctaaagtaaggctctcctgctgggcactcctgccttgagaattggaacgttggccctggcctccggggctctctaagtccccccatgaaacttctgtgcactctcatttttgtgtgccacttgggcgtttgtatactaacaggcacctatggacgtcaagagtaagcacagcgctcagggagccttggaaagaacctccgtaggaatctaggttttgggcattagatattcattctgtgtttaagatgaccctgaagagtgcctccaaggttggggggggcataaattaggcacatgctgtgtatgggtcgaccgagggagtggctgaggtggtcacactaagggactggtaagaggagtgtcgctgggaagcttggggaggagcagagtggggcttcacagggctacaaaggctgtaacaggaaggaggtaatttctccggagcaggttttagggctatgaagcaaatggtattgagaggaagacactgtcgggccctttgttcttgcccttgagtttcttcaagttatgagaagagtgttagggccaaacctaagagggggatatggtggaacaagaagaggtgagaagtcgaggccacagaatgccactaaacccctccctcccagatccagtgagcctgcctccccttcccctgagagagatgctgggccagtttcctctggcactgcctattgagggtctgttgtctagggcatgtcggagggcaagatagagccagctgccaccctaaaggcactgtcttcctggccctggagtgctgctgcgccccaccagcccttgcgcctgcccttgcgcctgccccttgccttcctgacctagtcctgccctagtagtgggaaagagcaaagtccctgtttatgcccatgccaggtgtcggctgaaggaggaggaggggacgggaagtcatgagtagggaggggggaaccctggccttttccgttcccaagctcccaggtttcctctctttcaggaaggagcctcttccttgcccccctccctgtctactccaccactaatagagcccccttttccaaatggagacttaagtgtcacaggcaggttaagtgtaggagatagtacgctaagtatagcttcagccctggccctctggacacacacataaccctgtcttatttacagccacaggaaagccagtctagagtggaggtcatgggcggtctagccaggcccagcttgggggaagagatgaggtggcaatgaacagggcgggtgtagggttgcataggtgactcagggtagtgggcattaatcctgggctcaccaggctccaggcaaaggcagtggcagagaaaggtgccactgtgagctaggccctggtcctggagagacagatactcagctatcagatttctctgccgcttttgcccggaggccaacactggggcaaaccagtcctgggctgccctggggtcctgggggctgctcacttttgacgaggtaaaatttcacaggctctcaagagcgcctgggcgggtagcgaggtggatgaggcacgagtgagtcagtgcccatcacgggaataggggaaagacgccaggcccagagctgaaatacctgttctgaaatggcttctatgtttatctctccagagaggaattttaaaagcctccctctgcttctctctctctaccccccccccgtgggggaggggcccagaaagtctcattttagaggctgcaagcagttgcaaggccaggcctctaaggggtcatgatgactgggtagtgggtggccaccgtggaaccccaccatcaccatgggcaccacccatgccaaggactcgggttgaaagcaagttggcaggcagctctgctgagcctctccctggcagagcttgggggaattcagagaagctgcctggctttcagtgggaggggggaagcactttcctgctgctgagaccctacccaggctggagccaggtgtctggagctcagtgggaggggccggtgggcagtcaggctggagcctgcagggcttggggggaccaacgggggagaggaactggctccacctggggaggagggaagagctggggcagcctcaggtctaagaaccacagcgtttcatcaggggaaggcgaaattgttactcttggagataaaatcacagagattttcaggagtgagaaagtggaacgaggagatcaggacacaaatccgagtaacaggaaagggaggtttgagggacactgagagagtttgattatctgtgaatctgttggtctaggcattgggatgctgaagtacactgggaatctgagggagactcagtgtgaggggcgggatgggataagacagggatgtgacagggctcagaaggatgggaaggagaaagagacctgggctcctaagcacagaccagcccagagtgcagtctatccaccagcatttaaagaagtccccggggaacagtcgtcagtagaatacagaggaaagtgggctatggaaatgtttagaagcccttgctcgggcgaatgcctggagagttctagaaggcacttcgttacccgagagactcttggtggatgttatttggataatgagtaagagatcggtagtgagggaatgaagaagtcaagatcagtaaatgcaggagttgaggttctggaaagcctttgggactccagtgtgagaagtgaaggacaatgtaatgcattggaagttcaaggctctgggctgacttctgactgactggcttcctcctgctttgcccgggctcaggttccgtgaggaggactacacggtgcacgtgcagctgaatgactacctagacatcatctgcccacattacgaggacgactctgtggcagatgcagccatggagcgatacacactgtacatggtggaacaccaggagtatgtggcatgccaaccccagtccaaggaccaggtccgttggaattgcaaccggcccagtgccaagcatggcccggagaagctgtctgagaaattccagcgcttcacgccttttatcttgggcaaggagttcaaggaaggacacagctactactacatctgtgagtgcacaagggccaggcctcagagcactggtggcctcatgcttagtggggagtcaagtagccgagagcttccccttcagagtctaaactcagttttctcccattcgcatcagggatgtggtgtgagcttcaggtgtcttaggcactctgtttggtaaatgggaacaaaggtcaaaaacactcctagcccctgtccttgaggaagctgggaaggatcccgaataaatcagcagggcaggagagcagtgtatgatagacatgaacaccagacattgggaaaatgtatatgagagccctgtcttcagacacaccagaagagggcatcagatgccattacaggtggttgcgagccaccatgtggttgctgagatttgaactcaggaccattggaagagaagcctgtgctcttaactgctgagccatctctccagccctgacacttgggaaaatgacccatgtgcctgcccgaggtcaaagacagaaaaggccaagtgggtccaagacagaaaaggcggagtccagaatgactggaacaggagggcacacgcacaaagggagggtgacagctcctggaaagagagtacaggaaatagagagctgtgctcactcagaaagtgggtcggacagcttcttcaggcccagatactagtaagagttcagactttgtcctgagggcagcagaaacctgttgatgtatcccgagaccgagcaggccaggggctttgtgaagaccagatctgggccttagtcttctggctgagtctagttcagcatggtagaaaatggtccagggaaagggggcttacacatgaacacctcacccaacttcaggtggggggtgtgagatgggctgtgtgaaggggacagtgtccacggccctgtcactccactgttaaagctgagcgttgttgcagagaaagggagatggggctgcgcactggtcagaacgtaggtaacaactgaaaataaatgccacgggtagctagctaggcgtgggctcacctgtaatcctggcaccaagtttcaggtcagtgtgcgctagagcaagaccgtgcctaaaatggatttaataggaatgtccatcagtgaagagcactggtcgattcctagccccacatagcaatgacaagtctaatagatctcccgttccagaggatccagtgtccttttctgacctctgcaggcaataggtacacagcacagtactcagacaaagcaatcaaatgcaaaaagttaattttaaaacattttaaagatttatgtattatatatatatatataccattgctgtcttctgacacacaagaagagggcatcggatcacaacggatggtggtgagccaccatgtggttgctgggaattgaactcaggacctctggaagagcagtccgtgctcttaactgctgagtcatctctccagcccctttaaaaacatttttttttaagatgtatttattgctgagcagtggtggcgcatgcctttaatcccagcacttgggaggcagaggcaggtggatttctgagttcgaggccagcctggtcttcagagtgagttccagtacagccagggctacatagagaaaccctgtctcgaaaaaaaaaaaagatttatttaatttatataagtacaccaaagctatcttcagacactccagaagaggctatcagatcccattacagatggttgtgagtcaccatgtggttgctgggaattgaactcaggacctctggatgaaagttagtgctcttcaccactgagccatttctccagccctaaaaacattttaaagattaaattttaaaatcaaatgcagacaggagaaaggaattgaagtgagcagggacaggtctggtgggacacacctacagccttagccctggggaggccaaagcaaggagagttgggaaggttagtttaaagctaacctgggctaccatattagagaccttgtcacaaaagggaggggggcactggagagatggctcatcggttaagagcactgactgctcttccagaattcctgagttcaattcccagcaaccaaatggtggctcacccatctgtaatgggatctgatgccctcttctggtgtgtctgaagacagcaacagtgtactcatatatattaaataaataaataaataaataaataaataaataaataaaaaccagagagagagagcgcgccagtgagatagctcagcaaataaaaaggcgcttgctgccaacctgacaacttggatttgatccccagctcccatgtgactgaaggagagaatttgctttcccaaattgttctctgacctctaaacatggaacacacacacactgaataaatattttatacagagaaggagggagggagggagagagggagggaggtgatgcttgcctataattccagcactcagaaggtagaggcaggagatcaggaattcaagagcatcctcaactgtacatagcatgttcaaggccagcttgagctttatgagatcctgtcatcccaaaatttaattaagtttttttaaaaaagcagttactgcacaatcctgacaacctaaatcttgtccagagcccacataaaaagccagatgctgttgtgcacatctgtaatcgcagcactctgatagggagatggaaggcagagacaagagacttagccttagtggggtgtgatggtgcacacctttaattccagcacttgggaggcagaagcatgtggaattctgtgagtctgagaccagcttggtctacatagtctgtcccagagcaggctctgtaaagagaccctgcctcaaataaataaataaaaattaagcagggcagccgggtggtggtggcggcacacgcctttaatcccagcacttgggaggcaaaggcaggcagatttctgagtctgaggccagcctggtctacagagtgagttccaggacagccagggctacacagagaaaccctgtctcagaaaaacaaacaaacaaaacacaacaacaacaacaacaaaaacccaaaaaacagggcatcgagtcagacaattttgagctcctatcttagcaaaggctctttccttaccatcctatggatttattttacagccaaacctatctaccatcaggaatcccagtgcttgaagctgaaggtgactgtcaatggcaaaatcagtgagtgtcaggccctgtggaccacttccttccatctgtgctgggcgtggtctagtggtctgggatggggatggaagttgcctctctgtctcctggtgcaaaaagcctgatctacttccattcttatttttcagctcataatccccaggcccatgtcaacccacaggagaagagactccaagcaggtaggtagtagcctgagacagtttggtctgggtcacaggaaggggtttgcttaaagagactgaggagtaaggtggctccctagccacatacgggctggctaaatcctgtgtggctggaagccgatgcaaacacttaccatgtctgtctttgccttctcaccttgcagatgacccggaagtacaggttttgcacagcattggttacagtgccgccccccgcctcttcccactggtctgggcagtattgctcctaccactgctgctgctgcaatctcagtgagggtgtacgcttgccctggcttatggattggaatgggactaaggggcagccccagccctgggaacctctcccactacacccacaagacgccaccatgaagcctcaaaaggttcagtattaagggttttaaccgaaaagagtttaaccagcccaactgtgccatccctgcctccacttcagagggatggagaaagaagtggagaaggtccttaacctgcagtttctgcctttaagccaaagaaacaagctgtgcggacctggcccattaagaggcctcagtgggagaagggctaaaaagagcctgaggtcatgcggttggacactgaacttggtaaagacgtccttccccaaggaagccataatgtgcagatgaactgaccgaaggaaaagcttgagacagcttcctgcgggggagccaggtacagaagaggcagcttgggctgacccagcatctctgcaagatttccacctgctgggctgccagagaggtttgtagcccggccctgactgcatcctccccatccctggggcaacattccctggagctgtgccaacaggaggactgaagcagcctggttttagagtgtagctgtaagggcagtgcccgtgtgtacagtctgtggagtttagcttaacgggcagggcccacatgtacagtgtctgtatataaatgtgctgtatctgttcatttctatgactgcagggtttttttatacagtgtttttggattcataataaattgatggttttttatggacatgcttttctgccccaccatgttgatttgtgaccagtgtccccattgtgtgttaggctctgtgctaaacagaagcaatggggggggggtgtgggggggggcaggtataannnnnnnnnnnnnnnnnnnnggggggggcaggtataatgcagagctccttttgcggctgaggtgggaaggttaaaaacttgagactgcatgagtaactcagaccttgcctcaaactcaaaaataaaaggctggaaatgtaccccaagaagtagagggttacctaacgtgtgtcagccctgagttcagtcctcaggagcacaaaacataagtagccaggcatggtggctcctgcctgtgaccccagcactcagaaggttgaagcaatgttgccaaaattccaatgccagcctgggctacagtgtgagactttgtctcaccaaaacaaaacaaaaaaagtaaataaaagacaaaataaataaatggctaggatcagtcttaccaggctaaaggagtttactcctgagggttctgcacaactccctgcaagagtgggctatagattcctctccgcacccactctttgttcttcctgtccaacttcaccagcctcgagcgctgggctttggcacaccatgcaggtactcatgctgtctgggtgagtcagggagctggatgccagctgaagcatgtgcgctgccccaccagcagagccgcctgggaggctgggagggaaagttcccagcagcaagtatgttggaacagggggccaggggtaggcttgtccttggatagggcaggtcgtgtaagagaggacatctgaaagaggatggcaattcctgcttttgggggacagactggaaagaggtttcaataacctccaggaaaaccctcccaaagctgggtaaccaaggttctgatatgaattgggggcgcgttgaagacctgtgagactaaatttgaggtttgtggtccagcacacaaaagcatacaagaacccagaagttgaggctagtggtctcgatgatgcaaggggtgcgcagtgtgaggaggggtcggatcggggacaaatgcaggggcactactaaaaccactaaacgcaatctgaacagcacgatcaggacccaggcccgcacattacagcaaaccacccggccagcacgcggcgctggtttggctgggtccccagttccggtgaagttcgggcgagggcgggttccggcgcggttccacggggaagggcggagcttcgccttccgcagctccgggtctgagctactggaactccgcgctgggctagggaaccggctccggtgggatggaggcgggcggcgtggcagactctttcctttctagtgcctgcgtgctcttcaccctgggcatgttctccactggcctgtgagagtgtggatggactgggctggggcaggaagtcaagaaatgaaagcgggcaagagacgtggctgcaatatcttgctgcttttggaacccagaataatagtggaataggattggatgatttgaggtccaaggcgaggctgcctcttggcctgaggggggagatctgcttgtcgttcaggatgattggtaaacaccgagaaatcttttacccactcctaacaatttcctttggatcccttccagctcggacctcaggcatatgcagaggacacggagcgtggacaacatccagttcctgccttttctcaccacggatgtcaagtgagagtgttgttggctgtgatgggaaaggctgagggaggtgcaagagatccctggagacctgctgcaaccccagcagccccttggaccttaatcctccttccctcacagcaacctgagctggctgagttacggagtcttgaagggagatgggacccttatcatcgtcaatagcgtgggggccgtgcttcagactctttatatcctggcatatctgcactacagtcctcagaaggtagaggccctcccttgcactcacctccaccccacacctggccatgttggcagagcatatagttctatttcctggaagattagtgggatggcattaattccctttcctagaaggcccttctggttctcctgcccatgaagtcaaccctttaaaatgcacacagagccacccaccctccccttgttcgaaatgctggtggcttacccaaccccgtggtgtcaagatatcctgtgctcccccaacaggctgggggaagagggctatactgtctgatagttcctttagggttaggaccagggccaatggctaagaatggccattcgctctgcttccccactcagtcacactaacatttattggtctcttattgtacatgtatgtgaagctcacatgaaaaggggagggatctaaaaatggctctccccttccctggggatctccagtgttgtgtggctgagatttctctcaaataactgagtggtgagaggctgacgtgaaggccgggataaaagttgatttccccattagagcatggcagaagacaggaggaggcaattccagcagagagatgagtgttctgggtacagatgcatgtaagacgcctctcccctgcagcatggtgtgctcctgcagacggcaaccctgctggctgtccttctcctgggttatggctacttttggcttctggtgccggaccttgaggcccggcttcagcagctaggcctcttctgtagcgtctttaccatcagcatgtacctctccccactggctgatttggtgagtaggggtggccaagaggtaggggagatgcggagaagggctaggctccctgagccagggactggctaatactggggcgggggcggggcccagctcttggaagaagtcaaggtagcagaggtgagtgggatgcaggaaaagggctgaatgaaagacgcaccacagggattgtggtcttttttccgcgaggaaattctctggcgaggactcaggaatggttctatgaacctgaaccaggcacatttttgccgtaggccaagatcgttcagactaaatcaacccagcgcctctccttctccctgaccattgccacgctcttttgctccgcctcttggtctatttacgggtttcgcctccgagacccatacatcacggtaagcagactctagattgggacgttgggtctacaaagcagagtctggtctttctagcagctttttgattgcaggtgcccaaccttccaggaatcctcaccagcttaatccgcctcgggcttttctgcaagtaccctccagagcaagacaggaagtaccgcctcctgcagacctgaccccaggcacccgagtgccaactggataccaaacagagctcctgtttctgctggtccttgtgaccagttccatggatgcaataggttgtgagaaaaagatgactttgaaactaaagggaccaaagatctttccttagatcagataggacctgtgggatgaaatcacatttttacaggagatcatcttttctcatttcggaggctgaggtggtattagaatgtgccttaaaataaactgttccccacccctgcctgcagagtgatgtgttcttcgccattcccaacctgcctgacttgacagacagagggcctactgcctggggggcctgtaggattggctcagaaaagggatttgaaagaactagaagttaggactggagagatggctcagtggttaagagcactgactgctcttcccaaggtcctgagttcaattcccagcaaccacatggtggctcacaaccatctgtaatgggatctaatgccctcttctggtgtgtctgaagatagctacagtgtactcacacacataacataaatattttttgttgtttttttgtttttcaagacagggtttctccgtgtggccctagctgtcctggaactcaccctgtatacccggcaataaatctttaaaaaacaaaaaacaactagaagttagaaagatccaggaagtccttttaaaaagaaaagaaacctggcagtggtgacacacgcctttaatcccaacacttgggaggcagaggtaggcggatttctgagttcgaggccagcctggtctacagagtgagttccaggacagtcaggactgcatggagaaactctgtctcaaaaaacaaacaaacaaaacaaaaaaacaaccaacttgaaagctgtgaagaatggaaggaagttagggacccatgcttcctgcgcagccttgtatgggaagcctcgcagcacttccaaggttgaagctgaagcgggaggaccacaggttgagggcagcctgggtagcacgacagggttggttgtaagccaggttgaactacttattaaaaccatatatattaaaaccatatacacaagtaaacaaacctgttttggggatatagttcagttgtggacttccaagtttgaagcccagcatgacataaactagtctagtcatggtgggtttagcctgtaattagagacgttagaatcgagataatccacagccatatggctggggtcaaggccagtctagggtacatggcatcctatttcaaacagaaaaaaaatcttgagaagggaacagaacaccatcaaaatgcaaagctaagtaaggcctggtaaggtggttctcctgccccctcacctcttgacctctagtatatagaatccccatcccaccccccaccccaccgctatcctccatactcaaaactacacaagattagaaaataaaactgcattttaatgcggaatgaggaaagatgtccagactggaatgggtttaggtgtcagaagcgcagccccctgcgtgctaaatcagctcgggcctccacgatctggctctgcagctctcgggcagcgtcctcgcagtcgtgaaatgtagctacgcgatagcccaccgtgcccagggcatagcagccagcggagaccaacaggtaggcaggcagtggccacaggacctctcggcaggggaaaggcaactccaagcccagtgctcccatggtcagggcagcccaggcagagcccaggagagccagtccccaaagccactgtgttaacttcgtcatgttggctgcagggagaaaaatcaaagctaagggttctttctaccgatccccgctctgcatctgacatttattcccagtctccgccacccatttccgtctttccactctgcccgccacctaagcgtacctccgtgtgccgcgctgacaaggcccgcatcagcatccggaagtccctttctactaccgccctttttccgggctgccttctgggaactgtagttcttaggacaatttcggccgcgctcagatccaggttggttatacactgctcttcgaaaatctgagttcagaagagtttttgccgttttgttctggagacccacatcgataccggctggaacttgtggacaatcggaggataccccgaaacgctgcgttaagatgggaatgttacatcgccccccttaaactagattctccagtgcagaaagcccactcattcaattattcaagcattcttccaacacacccatcaatcagcaaacatgaacaggccgcctcacacctgctaggcaagttctcaaccactgagcccttttatattttgaaacaggattttacagagtacccggaataaacttgaactccagtctgagatcctgtcttgaagaaataggctggtcatgtcaaattgaactgcaaatcacaggcccatatacctgtgattccagggcaattcaacagaagaagaaagaagaccatgaccattacaggatatgataaagggttggttgctaggggatggagaggtggctcagcagttaagagcactggctgctctatcagaagatcctagttcaattctcagcacccacatgacagctcacagctgcctgtaactccagttccagagaatctgacaccctcacacagacatacacgcaggtgaaacatcaatgtgcataaaataaaaaaaaaattttttttaataaaaaggggttggttgcctttaggtagcaataacagtttaaataaaacaagggggttttctttggcttgatttttggtttgtttgggttttaaatctttatttatgtgtgcatatgtgtgtctatctgagcgtatactggatacatttaggtgcctgcagaagccagaaaagctggagttacaggtagttgtgagctgtctgacactggagctaggaaccaaactcaggtcctctggaagagcagcaagcacacttaacagctgagctgtttccagcctggttggtattcgttttgttttgagacagagtctaatgtaatgtattccaggctggcctagagcatgggatgtagctgaggatggccctgaacccttgttactcctgcctctgctttcccagtgctagaattaaatgtgtgtgttaccaaaccttccttaaagcaattctgttgttggaaaaacgagtaaatgaggagtgaaaaagtcctgaggacatccacatgatcccaaggctcaggaggcagggctgctccaagttcaaggccaacatgaactacataaggaaggccctgatttaaagggaaaaaaatctagtctgagtggattgagggtccacttggaaatcacaaagcggggacagaagtagactgtaactccaagacctcacacagactcacgtgcaggctaaacaccagtgcacataaaataaaaattaacaaatgttcaaagacccattgttcaaagctttgtagctggattggaaatttagtttactttggtatgtcaaaagggaatccagaggggctggagaaatggctcagcagttaagagctctggcagctcttctagaggatcctctgagctccattcccagcacccacatgatgtccttaaccatctgtaactccagtttcagagcgtctgacaacactttatgacttcccgaggcaccagacacatactcagacatacatgcaggcaaaacacccatccatgtaaaataaaagagaaacaaaccaaacccttatttcctcaaagccttcaatgttaatcaacaattattatttataaaacaaaaacaaaaaacatgttactgagacaacagacaagagtaaaatgtgccgttttcttttttcccctttctttcctttccctgagacagggtttctctgtgtagccctggctgtcctggacctcttgttctgtagcctaggctagcctgaaactcacagagatcctcctgcctctgcctcctgctgggttcaaaggtgtgcaccaccacatcctggcctcaattaaaaagtcatttattaatttttattttacatgcattggtgttctgcctgcgtgaaagtttgtgtgagggtgtcagagcttggagttacagacaagggtgaactcagccagctctccagcccttcagaatttttaatcataatttaaatttgttttgagagtataattatgctacttttcctcctccatttccttcctccaatccctcccttgctctctctcaatgtatggcctctttttatttttttagatttatattctccgtgtatcaacggtatgcctctatgtatgaattcatcacacgtgtgcctgctacccaaggaggttaaaagagggtgtcagatcccctggaccagagttactgatggttataagcaaagtggcagtgactggacctggatctgttacaagaactgtacatgatcatggttttgttgttgtgatttttttttttcaaaacagagtttctctatatatccttagctgtcctgggacttagtccatataccaggctagtctcgaactcagagatcagtgttcctctgcctctgagtgctgggatgaaaggcatgtgacatcacatgatcttaacatctatatatagagagatttgaggcctcatgagttttcccccttccaggttagcatgtccattatgtctcttagtgtggtggtttagccaatcgtgttgatgagacttcatgcaagtagcttctacatttctagaagatgaaatctcacagctgattcactggttctctctctctctctctctctctctctctctcataatttatttatttttcatttacttgcattggtgttttgcctgcatgtatgtctgtgtgagggagtcaaatcacttggaactggagtttcagacagttgttagctgctatgtgggtgctggaattgaacccctaatctttcattagaagaactgccagtgctctaaaccactgagccatctctccaacccctcaaacatctctcttccttccttccttccttccttccttccttccttccttccttccttccttttttttttttttttaagttttctctctagccttgctttgtggcctgtaccaggctggcctgatgctcaggctcctgggatagcattcaactgaactcttcacattcctcctgagctcattttcacaccaatagcaatgtaaaaattaaatattaaattagctaaaactgccgggcagtggtgctgcatgcctttaatccaggcacttgggaggcagaggcaggtggatttctgagttcaaggcgagaaaaaaaaaaatttagctaacgcttagaatacatttaagtcaaggaggtaaggtaagactgtgtgttaggaaaatgagaatcagtgacaattaaatcttccttctatggcgagtctactaggaggccgtgccagtgggcacaaaggtcatcacctaaatagataaataaataaatgaaatcggaaggaaggaaggaaggaaagaaaaacaatcatatattatttagaaatagagaggaaaatcttaggagcagcagctttgggatgagagacaggagttcagcagaggagggggaggcagagctagttttcattagatacttgtaaaactgacccacttccataactatgtaagtaagttcctttgttaaagacagttccttaaagaagaatgcctgcccgcagtgacaacctccctatgagaacacgcccctcacaaaggttctcctccatccctctccagaaatacaagccgtgcctaaagggaaggccctatggtacgccctggatgtgaaatgcccaggatgcttctaatccccacggtcttgtccacacccaaatgctatcttgcatgttggctgctccagaatctcgtcagcctacagcaggaaaagcaaggctgacagaaggtggggcctcagcctactcaggaaggaggcagacacaggcctggctacaaaacagagcagaattagagcctactgcagcatgttgtgaccattaaacggtacggcgtcccacaggccaagatacacgcaggccgcccagtgaatagttatctttctgccaatgatcattattaaattcttttttatttttgaagggctgaagctgggaggtagaaaaagatgcagagcaccaaggctctgcttattttcttcaagaaaaggaagggccgaagggactggagagatgctccggggttaacagcattggttaagcccagggttctgttcccaacacctacagcggctcacagttatctgtaaccccacagatagctgcacagttagctgcagaggacccaatgttcttttctggtctctgcaggctggtggtggccagacgtgcctacaaaatgctcaaaactgttttataccgtgggacaagggactgggatgcatattttgcacatcaaagcagaattgacctccaggttctcccagcatccctcagtccctacctggcataccctgtcttccaacccaggagctgggctgcccttcccccagaggctcttccctatataatgcagacatcttggtctcctctctccctccctcccttaccctctccttcttttcttctctctctgattgcaccctttctctccctccactccaacctccccacggtaacttgcctggcctcagtccttggggccagtgaacttacctgagagcagttttccaataaacctgcatttaatataatctaatctggcttg

SEQ ID NO: 1389 - DNA, 1473 bp, Mus musculus
agatttgtgatcgtggtgcctactgtaccgtggagaagcctgtgggaaccttacactgcagagctctcgtcctggcctggctcggcccggccccgcgctatggagttcctttgggcccctctcttgggtctgtgctgcagtctggccgctgctgaccgccacatcgtcttctggaacagttcaaatcccaagttccgtgaggaggactacacggtgcacgtgcagctgaatgactacctagacatcatctgcccacattacgaggacgactctgtggcagatgcagccatggagcgatacacactgtacatggtggaacaccaggagtatgtggcatgccaaccccagtccaaggaccaggtccgttggaattgcaaccggcccagtgccaagcatggcccggagaagctgtctgagaaattccagcgcttcacgccttttatcttgggcaaggagttcaaggaaggacacagctactactacatctccaaacctatctaccatcaggaatcccagtgcttgaagctgaaggtgactgtcaatggcaaaatcactcataatccccaggcccatgtcaacccacaggagaagagactccaagcagatgacccggaagtacaggttttgcacagcattggttacagtgccgccccccgcctcttcccactggtctgggcagtattgctcctaccactgctgctgctgcaatctcagtgagggtgtacgcttgccctggcttatggattggaatgggactaaggggcagccccagccctgggaacctctcccactacacccacaagacgccaccatgaagcctcaaaaggttcagtattaagggttttaaccgaaaagagtttaaccagcccaactgtgccatccctgcctccacttcagagggatggagaaagaagtggagaaggtccttaacctgcagtttctgcctttaagccaaagaaacaagctgtgcggacctggcccattaagaggcctcagtgggagaagggctaaaaagagcctgaggtcatgcggttggacactgaacttggtaaagacgtccttccccaaggaagccataatgtgcagatgaactgaccgaaggaaaagcttgagacagcttcctgcgggggagccaggtacagaagaggcagcttgggctgacccagcatctctgcaagatttccacctgctgggctgccagagaggtttgtagcccggccctgactgcatcctccccatccctggggcaacattccctggagctgtgccaacaggaggactgaagcagcctggttttagagtgtagctgtaagggcagtgcccgtgtgtacagtctgtggagtttagcttaacgggcagggcccacatgtacagtgtctgtatataaatgtgctgtatctgttcatttctatgactgcagggtttttttatacagtgtttttggattcataataaattgatggttttttatgg

SEQ ID NO: 1390 - protein, 205 aa, Mus musculus
MEFLWAPLLGLCCSLAAADRHIVFWNSSNPKFREEDYTVHVQLNDYLDIICPHYEDDSVADAAMERYTLYMVEHQEYVACQPQSKDQVRWNCNRPSAKHGPEKLSEKFQRFTPFILGKEFKEGHSYYYISKPIYHQESQCLKLKVTVNGKITHNPQAHVNPQEKRLQADDPEVQVLHSIGYSAAPRLFPLVWAVLLLPLLLLQSQ

SEQ ID NO: 1391 - DNA, 27576 bp, Homo sapiens
  misc_feature (1)...(27576): n = A,T,C or G
aaaaaaattaatggggcgtggtggcaggcatctgtaatcccagctactccggaggctgaggcaggagaatcacttgaacccgggaggcggaggttgcggtgagctgagatcgcgccattgcactccagcctgggcaataagagtaaaactccatctcaaagtaaataaattaataataataataacaataataattgcatagagaaagtagtcttgaccccattttatgatgaagaaaaggtgaggctcagagaggttaggtaactttcccaagtttccacagctgggcccccgaccccacccctctctgcactgtctccctgttcaccagctgcctttattggatgtggcttgcggcacttaggcagagcacctgttatacaaacaaatgagctgtccattatctggccatctcccacctgcctgcagggacgggccagggtgagcttaagccctgggggactgcatctcagagcctgtcccacaaaccgcctcaggttccctctgagactgtcccacacccagccccctctctagctctttcctttaccttctctactgactccccccatttgctcccagcagatacagatatagcacttggtgccatatctcctttatccccaggagagccaggcaagtggggcgtagaaggaatagcatggtgtagatccaagccccatcaaatgtaccccacctgagttcttttttttttttgagactgagtcttgctctgtcgcccaggttggagtgcagtggtgcaatcttggctcactgcaacctccacctcccgggttcaagccatattctcctgactcagcctcctgagtagtagctgggaccacagacacgcgccaccacgcccaactaatttttgtatttttagtagagctggggtttcactatgttggccaggttggtctgaaactcctgacctcaggtgatctgcccacccggcctcctaaagtgctaggattacaggagtgaaccccctcacctggccttttttttttttttttttttttttttgagttttgagagagggtctcgctctgttgcccaggctggagcacagtgatgccatctcggttcactgtagcctctacttcctgggcttgcccctgttggcctgtgcgggaaccatgcgaggggaaatgcacactgagagtgagagtgagactcagtctccaagaaaaaaaaaaaaaagagagagagagagagagatggggtttcaccacattacccaggctggtctcgaattcctgaactcaagtttgcccacgtcagcctcccaacgtgccgggattgcaggcatgagccactgcgcctggctccccatctgagttctgaataccatcacctttcggagccttagttttttcacctggtcagtggggacataattcctgcctttgcccacctcgcaatgtgtaggagtctataaaaaggaaatagtatgtgataaaatgtacaactgaaaacactggactgtaataaaatgttacacaaatgtaagggattccaagttggttgtaacataggcattaaactataacttctcaaagatattgaccataaaacttacagagccatgggaaaagaataaagaaatgtgcatgttcctgagccttaacttctatgggtgatttttttctctctgcatttgtgtttctctacgttttctgcactaatcatgtattccttctggaattagaaaaaaaaaggcagagcacagtggttcatgcctgtaatcccagcactttaggaggccaaggtgggcagatcacttaagacagcagtttgagaccagcctggccaacatggtaagaccacatctctactaaaaatccaaaaattagcagggtgtggtggtgcacgcctgtaatccctgctattctggaggctgagatgggaggattgcttgagcccaggaggttgaggctgcaatgagccaagatctggctactgcactccagcctgagtgacagagaaagaccttgtctcagaaaaaaaaaaaaaaagaaagaaaaagagaggccgggagtggtggctcacacctgtaatatcagcactttgggtggccgagggggggtggatcacaaggtcaggagatcgagaccatcctggctaacatggtgaaaccccaactctactaaaaatacaaaaaaaaattaactgggcatggtggtgggcacctgtagtcccagctactcaggaggctgaggcaggagaatggtgtgtacatgggaggcagagcttgcagtgagccgagatcacgccactgcactcaagcctgggcgacagagtgagactctgtctcaaaaaaaagaaaaagagaaaaaaattatataaaagtaatgcttctgaaataaaagtatctaactcctggtcttatatactgtgttatagtgaaaaattttagccaggggtggaaaagaggtttatcggctgtaccaagagtgaatgtcctcctgccagtccctcacccagctttcccaccctggatgccaaagttgaggagctggaaaggacagatttctccccagccaaaatcacaaggaagggattcctggccctatgtctctttgctcttctcccctgcctgaagcattgcagtctaggagaaacccttcccatgagcctcagagttcacaagcaacaattgttctgagcttctcaccttcctgagctccagaccctcacctccaaccgcccctgggactcctcattctagaagttccactggtttctcaaatgcaacatgtctgcagcagatactattcactgcttacccaaaagccatgtaatccctgcttctaggctgatagaactccagtgtctttgggaagcagaacagattcaggggtggataggtccctgccccagccccagtcagagcactcccttctcctttgtagatatgggtgtagcaacggacatgtggacacacgaactggttctgttccttgtctgggaagttgctagaaaagattttcttcccagataaaaagagagccttgggctggtcccagataaaaagagagccttgggctggtcagaaggtagtgagttatctcaattgttcacagtcagttacagattgaactccctgctctactcttttctcccttctcacagctgcatttgactaggctttaaaaagggagaggggttccgggcgccgtggctcacgcctgtaatcccagtactttgggaggccaaggtgggcggatcacgagatcaggagttcgagaccagcctgaccaacacagtgaaacccagtctctattaaaaacacaaaaaaattacctgggcttggtagcgtgcgcctgtaatcccagctactcaggaggctgaggcgggagaattgcttgaacccaggagttggaggttgcagtgagccgagatcacgccactgcactccagcctcggcaacagggcaagactccgactcaaaaaaaaaaaagagagagggagagcaccatgggaggataggaccgctttgctcccactccttcttcttggggctcctgtagcttgaatggagctctctggctgaagcagccatcttgtgaccatggtcctgaggacagcagggcgtggggaagcactggaacttcggtgacactgttgagttcctgtctcacttccagactgcttgttatggggggaaagtaagccctttacttaaacttcgagtagctggtattctgttatttgcagccagaaatttatataatgtcccaaactgaactctccattcgtccttcctaggcctgttcctcccgtgcgtttcctatcgataaggagcactcctgcccaccaagccaccccggacttctcccagactcatgctcatggctcagctctcacctatctctgtcctctgctccccacctcctctgccactcctctgctccccccatctcctccagtagcaacagtcaggggagcagaggacagagagctgagccagagtattcactgaacaagctctcacctctctacctgcgttctttgttccctcctccctgaatgggaatgcctacttattctccaaagcccatttcaaatagactctcttctatgaagcactccccaccccagataaacattccttcctctgtgagtctacagcttgttatactacttatacctctattatacttcttatcatgtattctaattatacatttgccagaattataccttcttttttttttgtttttgagatggagtctcgctctgtcacccaggctggagtgcagtggcacgatcttggctcactgcaacctctgcctcccaggttcaagcaattctctgcctcagcctcctgagtagctgggacaacaggtgcgcaccgccatgcccggctaatttttgtatttttagtagagatgggggtttcaccatgttggccaggctggtcttgaactcctgacctcgtgatccacctcggcctcccaaagtgctgggattacaggcatgaggcaccgcgtccagccccagaattatacattctttaggacaaggatgtatttcagagtccctagtgcctcccagtgtagtgtttggcttaaatgattagtaaatttctggtggaaaaggccccaatataaagcatcttctggccgggcacaatggctcatgcctgtaatcccagcactttgggaggccgaggcgggttgatcacctgaggttgggagttcaagaccagctggccaacatggcaaaaccctgtctctactaaaaatacaaaaattagctgggcatggtggcgtgcgcctgtaatcccagctactcaggaggctgggacaaaataatcacttgaacccaggaggcagaggttgcagtgagcctagattgcaccactgcactcagcctgggcgacagagtnnnnnnnnnnnnnnnnnnnnaaaatgaataaataaataaaaataaaccaccttctgctgctttctgtgcaggaacctgagtcccatccttctgagcttctgcctctctcatctccctcccactctcccatcctatccaatttcctcttccctgcagtggacttctggggagaattccaccttccctcacagagtctggcccccttctgagtgggatgtggggaggaaattttatagaatatgtccaggggagtggcaggagatgagacagaggtggtgtgggggccatgttgccaaaggccttaaatgccacgctgaaggattttgaaattactctgtagcccatagataattaagtagaaacagatcttttagttatagtcacctcgattctcaagaagataactggactagtatcaaaagatctggctttggtttggcaatatcaaaagctttttcacacatctgtaagcccaaatgtaagccggtccatagtaggtgctccataagtgtttgttgttaagtcaattgcagggttctttttttttttttttttcgtgagacggagatttgctcttgttgcccaggctggagtgcaatggcactatctcggctcaccatatcctctgcttcccaggttcaagcgattctcatgcctcagcctcctgagtagctgagattacaagcatgtgccaccctgcccggctaattttgtattttttgtagagacggggtttcaccttgttgtccaggctgatctcgaactcctgacctcaggtgatccacccgcctcagcctcccaaagttctgggattacaggcgtgagccactgcacctggcaattgcaaggttatttctaagttcttttttagagactgtctagctctgtcacccaggctgcagtgtagaggcatagtcacagctcactgtaacctcaactcccggactcaagtgatcctcctgcctcagcctccagagtagcatgcactatgtaccccagctaacttattattattattattattattttgtgtacagacgggttctcaaaatgtcacccaggctaatttctaactcctggtcttacacgatcctcccaggtcagcctcccaatagtcctaagttctttttctttttctttttttttttttttttttttgagagtcttgttctgtcgcccaggctggagtgcagtgcagtggcacgatctcgggtcactgcaacctctgcctcccgggttcaagtgattctcctgcctcagcctcctgggtagctgggattacaggtgtgtgccaccatgcctggataatttttgtatttttagtagagacggagtttcaccatgttggtcaagctggtctcaaactcctgacctcgtgatctgtccgcctcagcctcccaaagggctgggattagaggtgtgagccaccatgcccggccaatagtcctaaattctaagagccaatccacccaactgctcagcaactgagggatgtctgaatgtgcatggatatgtttatttctgtcctgctttcattgcaatggcaaactctgaaatactcacgtaatgaagcattacactccctttaaaacattgtttacaaagggtttataacatggaaaatgtcttctgttgtaaagggaaaaaaagaagcacacaattgaaatgagtcatgtttatcacattgtctaaaagcaagcaaaatctcttccccagcaaaaagctggcagggcagggaggccaatgttaacagcagccggtggtcctcccctccccttatcctcctgttctctattttccaactttttttttttttgagatggagtgtcactctgttacccacgctagagtacagtggtgcgatctcagctcactgcaacttccacctcccagattcaagtgattctcctgcctcagcctcccaagtagctgggattacaggcacccacgactacacccagctaatttttgtatttttaggagagatggggtttcaccatgttggccaggctggtctcaaactcctgacctcaagtgattcacccgcctcagcctcccaaagtgctggaattacaggcgtgagccaccgtgcccggcctattttccaacttctgaaaaatgtgtgcacattactaataaagtggggaagggtatactttatgtttcaaaatgaccttgagggagtacgacagagattgctctcagcccaggttctgctcctccccctgctgcctcaccccattgcccagagatgacccctggggctgagccaggtttcacttgccccagggccctgcagctctggccttcccctccccaaactgcagggcacccagcaaaggagtcgcaatccagtacctgcacctgttcccaactggaaatgctgcctccaggcagccagggcctaccccaagacctcagaggaatttcctctgaggaaattcctgccctcccaggaatttccagaaaggactcatggaggaatttcctagacatgcagacaggcagacagacagacacctcaggcagctctcgtcactaagcgcagatgtttgcctgcgggtgacgtgctgggagccaacacaagcacacaattttgcggcgagaggcagcacgaagcaagaatggagagcagacccacccgggcaggctgggggctggcatgaggaagggactgggagggggccccagagttggtcagcagatcgagtctccaggaacagaagtccctactattatctctgtctgaatggcacagtgccctgcaactctcctctcagcacagcaggcattgcaggggctccaggaagggtcagggtagtgtgactgtgagtggtagggccgcagtctgggcttgagcacttagcaagtttgctgtcctggtggcttgtcaatatcccctaccggcctgggggctccccaaggtagtgattttatcttaaacccatccttacactctcggtgcccatcgcaacacccagctcatcacaacactcagtgtctagggctgctccagtagggtggatgatcgacccccatatggataggggagtggatagagagtgatgggatcaatgccctaagtgagatgagaatactggggacagcaccaaagcagggaaagagggctccgggtcctgtcggtgcgcagaatttccatgcacgcttctgcacccagcttgctccagacctagacgcaggcaagagctgacgtggccccgccagactgggcccagcgagcccgaacctgcctggcccaagcagctgcagcgtgggacttcacacgtccccgcccagtcccagtggtcagagaaaccagggaatccggcccaaagctgtctcctccaggaggcaacccgggccacctgctctaaagagctaccagcatccctcccctcttcaacccccctgctggctccttttcagaacagttatgtccagcagaagttaagttccttcactgaacagtgagtgatttcactcactccacagatatttactgaccatctactgtatgtgctagatgctgtgccaggtgctggcagtaagataatgaacaaaacaaaaacccatgtcctcctggagctttgactctatggaatgcccgaactgggaggcagtactctcgccggggccacgtgggaggtcgacacccaggtgtcctcctaggtgagcaaaaggcgcgtgaggtgccgccctgggagcagtcggcgggtggacttcgtcctgggcgagaggagcgggccgcacctcggacaaacgcttggctgggcacgtcgcctggggcaggtgcccgagggagaggggggtggcgctggccgtgcgcaaaacccggccctgacccggccacggggttagaggccgttggtactctatgtttattgtaaacgcagcgaatacggcctccagcggcctcagcgcacgtggtggtgcagtggggagccggctgggccctccccagctccaggctcctccccggcggggtcagcgccagacttgctgcggcgtccgggccccgcgtaattacaggggctgtagccaggcctggccgtaaaataggaggatgaaacggcctgggaactggagaagctgggccggagctggccaggggccccgggtccgtggcttcccgcgatgcgcagccgcagggaagggccggctgaggatgcgcacacacactcacaacaccaacctggcgcgcacacagccacacaaccacacacgtaaaccaccaaacgcacgcagacacacagcattcggctctcccactccaggctcactcgtgagcctaatcaaacacctgcccgccctctccaccccaggagctgacacccgcccgccaagccctctccagacggcagcagatccaggcggggagaagagccccgagaggcaaattccagtgggtttgtttacacagcgcgggggagggggcctgagccgggtactggggcccgactgactgggagccccagctcagactgggccagctccagctgtgcagcctgaggactgcgcacaaacgcccctccgttccaccccacccccgctgcacgccggtacgcgtctcccctcctcttcacacgctgttcacaaacattagcatacgtctgtcaaagagtttcacacgcttccacacacgcggctgtgatactactcacaaatgctttcatgctagcgcgccatcacacgtatttcatgtgtggttacagtttgtcacccttcatgcccagattctcacagtccatattcaagagcctgttcgcacggtgtacgcgtgtgttgttacatatactcaggttattagcgctctttgacttatctaaaataagaacggccccctctcgagcccagggtcccgcgtgtcgctcctgcgggcaggcactgatgtgatggacagaggcgtccttagccccggccgcacacgttacacactcgatcacacaaagcgttgcactttattcccggcatctaggcgatgacacaatctccagaacaaagacaacattgacaaacccaacaaaaacaaacagccgcgtgtgtgtggggaggggcagtcaagcgcagagtccgggaaggggatgggggaggaggagagtgtgggaacgcgggcgcccgagcctgggcatgcgaggctcagaaaggtgcggggcatgtcaacaacctcgcaccctgcaaggtccgcgcgcggagcagcaaagccgtgtcccgcacccccgcgttcgcagactcgcacttgcgagttcttcccttctcccgcacgcgactgcgcccagggacgcaagcccaccaccgggacaggctcacaaagctccacgcagacccacaagtgagcgaacacacatctctgagcagatctgcgggggcagaggagcgcgcttcgctctttcctgcacccccagcctcctcgcctccccaccccgcccctcctccacctccccagcccccaagcccccaggcagccgcgcgccgggcggggcgagggcggggcggggtgtcgggcggcgccggcccaaaaggcggagtcgctaggcgaaggggccagatctgtgagcccagcgctgactgcgccgcggagaaagccagtgggaacccagacccataggagacccgcgtccccgctcggcctggccaggccccgcgctatggagttcctctgggcccctctcttgggtctgtgctgcagtctggccgctgctgatcgccacaccgtcttctggaacagttcaaatcccaagtaagcctcgagactcccgctggcagcctgggctcccggctggcactaccccaccgggataactgtcccggccaaaccctgagctgagcctagagtagatgaccgaggtaggagggcggctgtagattttcctcccctcacttctccgtcatatctgggagcaccccaccccggggcatgcttgtgtctacttgcatgggcttatatctgcccttcccttccttctctctggcacccctattactctaaagtgagggactcatgctgggcagttcctgccttcagcatagacttcgcccctggcagccagggcccttgttccaggccccccacccccccactgtgaaagcctccacgcctctccttgtgtgtcctttgggtatctgaccacactgacagatacctggtgtgacatcaagagtgcacagaatgctcaaggtaaccctggaaggacctctcaggagagagctgggctgtaggcattcattatgcattcaccctgtatttaaagcaaacctggaaagtccctcactaggggtcttttggggtggcatgagtgaggcacatgctgtgcatgggtaggctgagggaatcacctgtttatggggctctcaagtagtaaaagcgaagagctgggagagggagatcatgggaaagcttcagaatgaacagaagaggttaaaggggttacagaaggttctgggcaggaaggagttaatttctcctgggcaggtttagggctgtgaggcaaatggtactgggaggaagactctgtcggcccctttgttcttgcccttgagttttctgaagttatgggaacaatatttgagggaatacaggagagggtggtagggaggagcagggagagaagtgggcagcttggtatcacgaaagccatctcaccggcttagccactctcggccctagcaagcttgccccccactccccttgagaaatatgttgtgccagcttcctctgaccccgtgtcatcgtctggtgaggcagtctgttgtctgtggcttgttagggtgggggagagaacagccagctgccaaccccagagggcaatgccctcctgcccatggacgctggggaggctcagccagccctccgccacccgctccctgtgctttgcctccttgacctgatgcatctcgccctagtatgggagagagcaaagtccctgtttatgcccatgccaggtgttgactggaggaggaggaggggacaggaagccatgagtagggagggggggaccctggccttttccgttcccaagctcccaggtttcctctctttcaggaaggagcctcttccttacccacctccccgccttccctgacgccgctgcccccctttcccagatggggagcaagagtcaaatgaaggctaagtacagcagactgtacccccaggagagggggctgatgggtgaccctctggccacacacacacacacacacacacacacacacacgcacaccctatcatacccaggactaaagagacgccagtccagagtagagtccgtaggcagccaagctgggcccaagcgtgggggcaaatatgaggctacaatgaacggggtaggtgaggctggcatgggtgactcaggccagtgggcagcagccctgggatctccaggcctcaggcgggggcagcatgctgagaagggcgccagcctccctcatgctggagggcaggcccctcattctgacctgccagctccctttgtttggaggacactgttgggggtgagtgggcgctgtgccctcctggggtcctgggggctgtgcacatttgacaaggtaagttttcacaagttctcatgagtgctggggcgggtagcagaggtggatgaggaatgagtcagtgcccgtcacgggaatgagggaaagacgccaggcccagagctgaaatacctgttctgaaatggcttctatgtttatctctccagagaggaattttaaaagcctctctctgctcctctcttttccccagggtgggggaggggcctggtaagcccagtttgggcgctggcacgctgctgcaaagcctggcctctcaggggtcatgctgattgggcagtgggtgcccacctccgagtcctctctgcctgactccttcctcgccctcccagccgtggccagggctttcagttcgaagcaacttagcgctaattctgctgggtctctagctggcagtgcctgggggaattagagaaactgaccagcttgcggggtcgggggaagcacttttccccctactgggaccccacccaggctggagccaggtgtctggagctggtggggaggggctggtgggcagtcaggctggagccggtggggccagggggaatgaactaggggaggggtgctggctccaccttgggaggaggggagaggaggggagagggggagaggaggagagaggggnnnnnnnnnnnnnnnnnnnnnnnnnnnnnnnnnnnnnnnnnnnnnnnnnnnnnnnnnagaggaggagagaggggagagaggggagaggggagaggctgtctcaagctcaagctcagagctccagcatttcatctagggggaggtggaagtgtggcttttagagataaaaggacagggttgttttggggtgctctgagaaggggaaaaggagaccagtgtataactttgagtagctagaaagggaagatttgagggggctgaatgaattgatgagagtgatttaacttaaaggactggggcattatctgtgggcccgggtatactagcttcacttttgaggaaaagtgaagctgggaaatgtgagatctactcagtgggtccggggaaatgtgagaggagtaaggaaagtgaagacacagatgtgttggaggctccaggctagcatggtaaagagaaagggtttcctggattctgattacagaatggacctgtgggggtctcagattgaggcctaacagcatttaaaaggagcaactggtagaacagatttggggaaatatttatgggtagaagagaatgataagtgagctacagaaataggtagaagcccatctaaatatcaggtaagtatcaggggggttatggaaaatgctttggtacccgaaagatactgagtgaatgctatttgaaggaccaacaggagacagtgatggtgcaggggaatgtttagagatggcagagagaaatgtaagacatcaagatcagtacatattgggagttgaaacttcggaaaaatctcttggggtccagtgtgaaatgtgagaggtcatgtaaacattcagaggcccaaggatctggcctggcttctgaatgaccacctgcttcttccccctgtgtgtgtccccaggttccggaatgaggactacaccatacatgtgcagctgaatgactacgtggacatcatctgtccgcactatgaagatcactctgtggcagacgctgccatggagcagtacatactgtacctggtggagcatgaggagtaccagctgtgccagccccagtccaaggaccaagtccgctggcagtgcaaccggcccagtgccaagcatggcccggagaagctgtctgagaagttccagcgcttcacacctttcaccctgggcaaggagttcaaagaaggacacagctactactacatctgtgagtgcctgtgaggggacagtgtctgtgtttcttttttgccattacatacatgcttgggtacatgcttggtgtagagtccagcagcagagggccccttccgatcttgaattctattttcattcatctacatcccaatgtgagtgagcttctactatgtgctgggcactctgtttagcgctatgagcacaaagataaataaaacactacagagcccctgtcctcaaggaagctgggaagaaacacacataggttaagagacccttagaacagtgtgctacagtagacatgaacacaggggccttgggaaaatgacctgggcacctgccaggctatggggctcagagaaggctcagtggggaagatggtcccagagctcaggacaagcagaggagctggccaggcatgaaggcacacgtacaaagggagcatgacatcttcagggaacttcctgtggctcagcctggctggagttggagggacacaggaagtgaggagatgtgagcctggagaggtggacagaacagaccatgggggaactaaaaggtgataaggagtttggactttatcctgagggctctcgccactgatgggttttattttattttattttattattattattactcttgagatggagtttcactcttgtcgcccaggctggagtgcagtggtgtgatctctgctcactgcaacctctacctctcggattcaagcaattctcctgcctcaacctcccaaatagctgggattacaggcacctgccaccacgcccagctaattttgtatttttagtagagatggggtttcaccatgttggtcagactggtctcgaactcctgacctcaagtgatctgcccgcctcagcctcccaaagtgctgggattataggcatgaaccaccgcgcatggcctgatggattttaaaagttatgagatcatccagcactttgggaggccgaggtgggtggatcactagggtcaggagttcaagacnnnnnnnnnnnnnnnnnnnnnnnnnnnnnnnnnnnnnnnnnnnnnnnnnnnnnnnnnnnnnnnnnnnnnnnnnnnnnnnnnnnnnnnnnnnnnnnnnnnnnnnnnnnnnnnnnnnnnnnnnnnnnnnnnnnnnnnnnnnnnnnnnnnnnnnnnnnnnnnnnnnnnnnnnnnnnnnnnnnnnnnnnnnnnnnnnnnnnnnnnnnnnnnnnnnnnnnnnnnnnnnnnnnnnnnnnnnnnnnnnnnnnnnnnnnnnnnnnnnnnnnnnnnnnnnnnnnnnnnnnnnnnnnnnnnnnnnnnnnnnnnnnnnnnnnnnnnnnnnnnnnnnnnnnnnnnnnnnnnnnnnnnnnnnnnnnnnnnnnnnnnnnnnnnnnnnnnnnnnnnnnnnnnnnnnnnnnnnnnnnnnnnnnnnnnnnnnnnnnnnnnnnnnnnnnnnnnntgctgcaacctccacctcccgggttcaattgattcttctgcctcagcctcccgagtagctgggactacaggcatgtgccaccatgcccggctaatttttgtatttttagtagagacggggtttcaccatattggccaggctggtctcgaactcctgacctcgtgatccgcccacctcggcctctcaaagtgctgggattacatgtgtgagccaccgcgcctggcctaggagtagtattaagtggcccaggcaagaggaacatattcagactcggaggaatgaaggatgaaatgtggggaggggcagtgtctatgctgagggttatttccaaagaatgagaggctgggctgaacattgggcaggaagttagcaaaaactaaggagggtaggaatcaaggttagagggaagagaagaatgaaattgagtagggagctgagaaagcagggcgaggggcatttggacttacattttcttccagcaaaggtttcttatttaacccctgtgggcttatcttgcagccaaacccatccaccagcatgaagaccgctgcttgaggttgaaggtgactgtcagtggcaaaatcagtgagtgtcggagccctgtgggcctccttcctccatctctatgctgggtgcggtctagtgatctaggatggtatagaagtcttgcagcccagcccactcatacttacagccctctgcctctttgatacagtacctgatctactaccactcttgtctttcagctcacagtcctcaggcccatgtcaatccacaggagaagagacttgcagcaggtgggtagctggagcaaactgggcctggggcacaggaaggggtctgcttgaagaggttgggtacaggaggtggctcctttaccaggctgaggctgagggaatcctgttgggctgagagccagtacaaatagtggagccactcacactggtggcctttgccctctcaccttgcagatgacccagaggtgcgggttctacatagcatcggtcacagtgctgccccacgcctcttcccacttgcctggactgtgctgctccttccacttctgctgctgcaaaccccgtgaaggtgtatgccacacctggccttaaagagggacaggctgaagagagggacaggcactccaaacctgtcttggggccactttcagagcccccagccctgggaaccactcccaccacaggcataagctatcacctagcagcctcaaaacgggtcagtattaaggttttcaaccggaaggaggccaaccagcccgacagtgccatccccaccttcacctcggagggatggagaaagaagtggagacagtcctttcccaccattcctgcctttaagccaaagaaacaagctgtgcaggcatggtcccttaaggcacagtgggagctgagctggaaggggccacgtggatgggcaaagcttgtcaaagatgccccctccaggagagagccaggatgcccagatgaactgactgaaggaaaagcaagaaacagtttcttgcttggaagccaggtacaggagaggcagcatgcttgggctgacccagcatctcccagcaagacctcatctgtggagctgccacagagaagtttgtagccaggtactgcattctctcccatcctggggcagcactccccagagctgtgccagcaggggggctgtgccaacctgttcttagagtgtagctgtaagggcagtgcccatgtgtacattctgcctagagtgtagcctaaagggcagggcccacgtgtatagtatctgtatataagttgctgtgtgtctgtcctgatttctacaactggagtttttttatacaatgttctttgtctcaaaataaagcaatgtgttttttcggacatgcttttctgccactccatattaaaacatatgaccattgagtccctgctaagtgcgaggctctctgtgctacaacagtagcaactgggtttgaatttctttctctccaaagaatgtgtgcccctcacgaggccaaaagggtgggatgtttcctcctctgagggctgtccaggaccggagtgctcctgacagctgtctctcgggttctgagctgcactccactctggaagttcttcctatccgacctctaccccactcccactccgtcaccgcagggctttggcatactaccattcaggtactcacgctgtttcggtgagtcagggaagctgggaacgccagctgaggcatgcggccccgccccacagccacactagcagagacgtgtgggaggctgggagggaaagttcccagtaacaagtgggttggaccgggggtcagtgatagaggcgtcagtggattggccacgtcatgtaaagttgacccgagagggagggcaaaagaggaaggcttggtgattcctggtaatgtgttattttgagaaaaagcttcggcagcacactccagaaaaaaacttcccaaaccctgggcaactgaggttctgatgtggagctctggatggaaagcgtgctgaagtcttgttaaactagcaagcttttgtttggaggtccaccgccgaaggcgcacaggcctgtgggaacacgagcgttgagactgggggcgtctagatgatccaaggggtaggcagagtgtgagcagcggcaggtatcggggacacacccgcggagccctaggaaggggactgaccgggacatggaagaggtctggaccaaggtactgggaaggcgctcggaggagaggggcgcgagttccggttcggcgtcggagggagggtggggcttcggcgcagtttccggagggacggcccgagcgtgcgggggcggagccgagtgcgcggggcggggctccagagccgcaggtctgggctgcagtaggtcccggcaaccgcaggctcgcggcgggcgctgggcgcgggatccgactctagtcgtaatggaggcgggcggctttctggactcgctcatttacggagcatgcgtggtcttcacccttggcatgttctccgccggcctgtgagagtgcggccgggctgggttggggaggactaggcagtcaggaaaggagagagaggggacagagacgtggccacagcacctggctcgtccggaaccgggatcaaagtgggatcgggtcgaggggaccggggtacaagggcgaggctggtcactaggcctgaaggagaaggcaggatagctggcgggggggagaggggggcggggtctgcggtggtccggaaaggatgacaggcattgggcatccccctctagcactctgcttctcccttcccacccccacccctcccttcggggccccattacagctcggacctcaggcacatgcgaatgacccggagtgtggacaacgtccagttcnnnnnnnnnnnnnnnnnnnnnnnnnnnnnnnnnnnnnnnnnnnnnnnnnnnnnnnnnnnnnnnnnnnnnnnnnnnnnnnnnnnnnnnnnnnnnnnnnnnnnnnnnnnnnnnnnnnnnnnnnnnnnnnnnnnnnnnnnnnnnnnnnnnnnnnnnnnnnnnnnnnnnnnnnnnnnnnnnnnnnnnnnnnnnnnnnnnnnnnnnnnnnnnnnnnnnnnnnnnnnnnnnnnnnnnnnnnnnnnnnnnnnnnnnnnagtgaaagaggtttggccgggcgcggtggctcacgcctgtaatccctgcactttgggaggccgagacgggcggatcacgaggtcaggagatccagaccatcctggctaacacggtgaaaccccgtctctactaaaaatacaaaaaattagccgggcgtggtgccgggcgcctgtagtcccagctactcgggaggctgaggcaggagaatggcgtgaacccaggaggcggagcttgcagtgagccgagatcgtgccaccgcactccagcctgggcgacagagcgagactacgtctcaaaaaaaaaaaaagagtgaaagaccctttgggtcctcctctcacactgaaccctttgagccatgtccatcccctccaccctgcagcaacctgggctggctgagttatggggctttgaagggagacgggatcctcatcgtcgtcaacacagtgggtgctgcgcttcagaccctgtatatcttggcatatctgcattactgccctcggaaggtagaggccctcccttggacccacctatctgctgcacgccctgccttgctggcagggcaaacactatttcctagaagactgtaacagctggcactgccaccttttccaggaaggcctctccagccttgcaggtccccttcctctatgaagccagccttctgagatgaacacattgcccccatttaggcaaggctggtagctctgcctagcctgagatgcctatgctgcctgccctgggcttcagccaacaagctaaggggaaagggcttttgtctctgatatttctttcagagccagggcctgtgggtgagaatgagatgattagctctgcgtccctgctaaatcacacaagcatttatgaagctcctactgtgtgtgccaagcacacagaaaaaaacacatatttatctcccccagaagtctccagtgttgtgggtggataagactttcctatcaagttggtggtgggaaagaagctgtgacagtgcagtgctggaggcctagacagcttggcttccccattggagcactggagaaggcaggatgaattaactctagcagggaagtcagagtgcacatctggaagtaagggtactctctcccctgcagcgtgttgtgctcctacagactgcaaccctgctaggggtccttctcctgggttatggctacttttggctcctggtacccaaccctgaggcccggcttcagcagttgggcctcttctgcagtgtcttcaccatcagcatgtacctctcaccactggctgacttggtgagtgggggtgtccaaggaggtaggagagataagagtcaggctctcatagccaaatactatggcttacagtcccgaggaaggggagatccaaaccctggaagaagacaaggcagtagaagtgggcgagtgggaggcaggaaaggttgggtgacagatcagggagggtgtctgacctttttcttgaggaaattcttaggcaagtgaagctttacgatgtgcttgggccaagagagtcttccattctttcccacaggctaaggtgattcaaactaaatcaacccaatgtctctcctacccactcaccattgctacccttctcacctctgcctcctggtgcctctatgggtttcgactcagagatccctatatcatggtaagcacaactgggatggggtgacaggggtgcaagatggaaaactggctcctctcctcatagcagttcttgtgatttcaggtgtccaactttccaggaatcgtcaccagctttatccgcttctggcttttctggaagtacccccaggagcaagacaggaactactggctcctgcaaacctgaggctgctcatctgaccactgggcaccttagtgccaacctgaaccaaagagacctccttgtttcagctgggcctgctgtccagcttcccaggtgcagtgggttgtgggaacaagagatgactttgaggataaaaggaccaaagaaaaagctttacttagatgattgattggggcctaggagatgaaatcactttttattttttagagatttttttttttaattttggaggttggggtgcaatctttagaatatgccttaaaaggccgggcgcggtggctcacgcctgtaatcccagcactttgggaggccaaggtgggcggatcgcctgaggtcaggagttcaagaccaacctgactaacatggtgaaaccccatctctactaaaaatacaaaattagccaggcatgatggcacatgcctgtaatcccagatacttgggaggctgaggcaggagaattgcttgaacccaggaggtggaggttgcagtgagctgagatcgtgccattgtgatatgaatatgccttatatgctgatatgaatatgccttaaaataaagtgttccccacccctgcccacgatggttcattctctactcataattctaaacctgcctggtttggtgaaggatagatccacagttattctcaggttggtagggtaggctcagaaaaggtatctcaaagaaccaaaaggttggaaagacccaggaaggccttaaaaataacaaaacttggatgttatgaagaatggaacttaggcttcaagaaagtacttctggccgggtaaggtggcttatgtctgtaatcacagcactttgggaggcccaggcaggaggatcacttgagcccaggagtttgagaacagcctgagcaacacagcgagaccctgtcactacaaaaaattaaacattagcctggtggcgtggtggcatatgcctgtagtcccagctactctggaggctgaggtgggagaactgtttgagcctgggagggtgaggctgcagtgagccatgattgcaccactgcactccagcctgggcaacagagtgagaccctgtctcaaaaaaaaaaaaaaaaagaagtagtacgccgggcgcggtgactcacacctgtaatcccagcactttgggaggccgaggcgggcggattacgaggtcaggagatcagaccatcctggccaacacggtgaaaccccgactctactaaaaatacaaaaaattagccaggcgtggtggcaggcgcctgtagtcccagctactcaggaggctgaggcaggagaatggcgtgaacccgggaggcggagcttgcagtgagccgagatcacgccactgcactccagcctggacgacagagcaaggctccgtctcaaaaaaaaaaaaaaagaagtacttcctacagggttgaaaggaccaggaaagtgaaatgtcatttccatcctgagaaatattgagaaggggtctttgcctccttgggagcaaaaatgggaacaccagcaagatgcaaagataaaggctgagatggcctcaagaaggtggttctttcacattcacttctcgaccgttagtacatagaatccccaatacccgttttccatactcaaactaaacgaagttagaaaataaactggctctttaatgggaaatgggaggaagggctgtccgcacaggaatggggttaggctgtcagaagcgcagccccctgcgggctaagtcggctcgggcctcctgtatctggctctgcagctcgcgtgcggcgtcctcgcagtcatgaaaagtggccacacgatagcccacagtgcccagggcatagcagccggcggacaccagcaagtaggcgggcagtggccacaggacttcctggcaggacaagggcagctccaggcccaaggctcccgtggtcagggccacccaggtggagcccaggatcgctagtccccaaagccactgcgctaatttcgtcatggtcactgcgagagaaggaagcaatgctcccctgaggagcagaaaggaaaagcggaccaaactcaaccgaagcccgcccacggagagcattaaaaccagccctggccagaggggaatcgccgatcccagaggtccgaacttgagtgcccacaaaaggtggaagggccccttccaccttgctaccccctctatatttgagacccactccccatctctcgccctccccattcagccttcaacctacacttacctctaccccacgtctccccttccccgcgcggcccggatgttggcgtccggaagtcctccctggttcacgttccgcttccgcgcggccttctgggagttgtagttcacctggcggcgcctggtgtactcctggccagcgcctcaatctaggcgggggtacagtgggctgtgctccgcaaacggggagcaggccgggtctggagaggcctcggcgctgctttcccaccttgggctacgctccaggctggcgtggggcttgaggacatccttaaatgttgcaacaagatgggaatataataccattccccttaaactcaattctccagcgctgaaatccattccttcattcactagttcattcattcgaagatttctttctttccattcttgacagggtctctctatagtgcctaggcgggacagaactcctttttttttttttttttttttttttttgagacaaagtctcgctctgttgcccatgctggagtacagtggctcgatctcagctcactgcaacctctgtctcccgagcagctgggattacaggcgcgcgccaccacgccgggctaatttttttatttttagcagagaacggggatttcactatgttggccaggctggtctcaaactcctgacctcaagtgactggcccacctcagccttccaaagtgctaggattacaggcatgagccacagcgcccggccagaacatttcttgattaccatgatagactttggagatacagagatgtcaagagactcgacccctttcaggtggagggggaaagcaggagtcagtgaagcagttgcattgacaactaaccatgaaggcttgagattattgttagaacagaggtagtcatatttttacaaggacaacaaccaatataacttggagccagaggaagaagggctccaggagtctgggtttcaaaaaaaaagaaaagaaaagaaagaccagaagaattacctgaagtggtgaaggcattgaaagaaagagtataattctttagaacagttttggggatgaatttattatgtatagagagaaagagagagagagaacaaagtaagagaaaaggttaggcaattatcaacttcagaggaaacaaagagttatataagaaaggaaagacaattgataagcctgtcttataaagaccacatctgtagtttgacagttaggtttattaacttgccacaacagagagatcacacactagaagaactgtggggcaactcattaaaaaggaagaaatatggtcattcagatgatatggtttggctgtgtccccacccaaatttcaagttgatgtgtatctcccagaattcccacgtgcgagggacctaaggggaggtaattgaatcacgggggccagactttcccgtgctattttcatgatagtgaataagtctcacaagatctgatgagttcatcaggggtttctgcttttgcttcttcctcatttttctcttgccaccgccatgtaagaagtgcctttgtctcccgccatgattctgaggcctccccagcaatgtggaactgtaagtccaattaaacctctttttgtttgcagtttcgggtatgtctttatcagtaatgtgaaaatgaactaatacaacaggatatgggaaaggcttgactttaaaatttatattttaaaatttatttacttatttatttagagttgaagtctcggtatgttgcccaggcgaagctcaaacttctgggctcaagtgatcctcctgcctcagcctcccaagtggctgatactataggctagctaaaatttaaatgaagcagtgttttgatcggttcgaggtaagcataactttaagtgaagggatcaagaagtccaagctgagggaccacttggaaattacaaagtcaagataaatatagaatatagtgtccaaaaacccactatctaggctgggcacagtggctcgtgcctgtaatcccaacactttgggaggccaaagtaatccacgtggctcagaacttctggcaagagtaggatgttccattcgcactgactgatttcaaatagcaaagtttgtgactatgattttagaaaatgaagtttctcagccgtatgtcctggatgttaattaacaaaagcagtttttacagattcacagtcttagcacaaacacaaatggctcagctgtgaagaaaattttcacagccgtaacgatgtaaacactaagtattgatttaactaaaaattggagctggggacagtggagctgtgatcccagaactttgggaggcctaggtgggagtgttgcttgaagaaatgtacagataagtaccagaagaagcagcctagaaactggagcgtagttgtatatgtaggttgtatatgtaagggttaaagaagaggagcaggggatggttatttttcattaaaagccttgtagagttacagctctttttttttctattctttttctttttttcagacaaggtcttgctctgttgcccagggtggagagcagcggtgcaaacatggcttactgcagcctcgacctcctggactcaagctatcctcccacctcagactctggagtagcagggactacagaagtgggccaccaccaccacgcccatctagtgtgtgtgtgtgtgtgtgtgtgtgtgtgtgtgtgtgtgtgtgtgtagacggggtctccctatgttgcccaggctggtctcaaaatcctgggctcaagcaattcatctcagcccccacaaagtgctgctattgcagtcgtaagccacggcgcccaccgaagttacagctttcagaatttgttgagcaggtttcccggttttcacttgaaaatgccccgccaccccgaaaaatatttgttgaactagttggcttttaaaactatacaaattcctttgttaaagtaaaaattaaaacaaataaaaacttttctttttttttttgagacagagtctcgttctgtggcccaggctagagtacagtggcatgatctcagctcactgcaacctctgcctcccatgttcaagcgattagcctgcctcaacatcccaagtagctgggactacaggcacgcaccaccacacccagcaaatctttgtatttttattaaagacagggtttcaccatgttggtcaggctggtctcgaactcctgagcttgtgatcctcccacctcggactcccaaagtgctgggattacaggcgtgagccaccgcgctcagcccaaactttttttttttttttttttgagccggagttttgctcttgtcgccgaggttggggtgaaatgacacggtcttggctcactgcaacctccgcctcccgggttcaagcaattctcctgcctcagcctcccgagtagctgggattacaggcacctgccaccatgcctggctaatttttgtatttttagtagagttggggtttcaccttgttggccgggctggtctcaaactccagacctcaggtgattcgccccctcgggtnnnnnnnnnnnnnnnnnnnnnnnnnnnnnnnnnnnnnnnnnttttaaacctgctatacgaccttcaaagccctagccacatttccatttccacaccaaatctttctggtttctcaatcaaggactcactggtcacaatgactttcaaatattggtatacttacaggggctggacacgagcattgcagatgcagatccagaaagtccattttattcatacacagtagacttggccctgaaactccccagaacattttaggggcttacaccaccacatataaggatagataataaattataaagtatttctgttttttgggttttgtttttttttttgagacagagccttgctctgtcgcccaggctggagtgcagtggtacaatctcagctcgctgcaacctctgcctcccgggttcaagcgattctcctgcctcagtttcccgagtagctgggattataggcacctgccaccatgctcagctaatttttgtatttttaatagagatggggtttcaccactctggccaggctggtctcaaactcctgacctcaggcaattcgcccgcctcggcctcccaaagtgctgggattacaggcgtgagccaccgcacccagccgaatgaagtaggtacttttctattcccatgtatgaatgaggaaaccatgacacagagagggcaaaaggtaagtaactagctcaaggttgtgcagatagtaaacagcaaagctg

SEQ ID NO: 1392 - DNA, 1965 bp, Homo sapiens
aacgcgggcgcccgagcctgggcatgcgaggctcagaaaggtgcggggcatgtcaacaacctcgcaccctgcaaggtccgcgcgcggagcagcaaagccgtgtcccgcacccccgcgttcgcagactcgcacttgcgagttcttcccttctcccgcacgcgactgcgcccagggacgcaagcccaccaccgggacaggctcacaaagctccacgcagacccacaagtgagcgaacacacatctctgagcagatctgcgggggcagaggagcgcgcttcgctctttcctgcacccccagcctcctcgcctccccaccccgcccctcctccacctccccagcccccaagcccccaggcagccgcgcgccgggcggggcgagggcggggcggggtgtcgggcggcgccggcccaaaaggcggagtcgctaggcgaaggggccagatctgtgagcccagcgctgactgcgccgcggagaaagccagtgggaacccagacccataggagacccgcgtccccgctcggcctggccaggccccgcgctatggagttcctctgggcccctctcttgggtctgtgctgcagtctggccgctgctgatcgccacaccgtcttctggaacagttcaaatcccaagttccggaatgaggactacaccatacatgtgcagctgaatgactacgtggacatcatctgtccgcactatgaagatcactctgtggcagacgctgccatggagcagtacatactgtacctggtggagcatgaggagtaccagctgtgccagccccagtccaaggaccaagtccgctggcagtgcaaccggcccagtgccaagcatggcccggagaagctgtctgagaagttccagcgcttcacacctttcaccctgggcaaggagttcaaagaaggacacagctactactacatctccaaacccatccaccagcatgaagaccgctgcttgaggttgaaggtgactgtcagtggcaaaatcactcacagtcctcaggcccatgtcaatccacaggagaagagacttgcagcagccctctcaccttgcagatgacccagaggtgcgggttctacatagcatcggtcacagtgctgccccacgcctcttcccacttgcctggactgtgctgctccttccacttctgctgctgcaaaccccgtgaaggtgtatgccacacctggccttaaagagggacaggctgaagagagggacaggcactccaaacctgtcttggggccactttcagagcccccagccctgggaaccactcccaccacaggcataagctatcacctagcagcctcaaaacgggtcagtattaaggttttcaaccggaaggaggccaaccagcccgacagtgccatccccaccttcacctcggagggatggagaaagaagtggagacagtcctttcccaccattcctgcctttaagccaaagaaacaagctgtgcaggcatggtcccttaaggcacagtgggagctgagctggaaggggccacgtggatgggcaaagcttgtcaaagatgccccctccaggagagagccaggatgcccagatgaactgactgaaggaaaagcaagaaacagtttcttgcttggaagccaggtacaggagaggcagcatgcttgggctgacccagcatctcccagcaagacctcatctgtggagctgccacagagaagtttgtagccaggtactgcattctctcccatcctggggcagcactccccagagctgtgccagcaggggggctgtgccaacctgttcttagagtgtagctgtaagggcagtgcccatgtgtacattctgcctagagtgtagcctaaagggcagggcccacgtgtatagtatctgtatataagttgctgtgtgtctgtcctgatttctacaactggagtttttttatacaatgttctttgtctcaaaataaagcaatgtgttttttcgga

SEQ ID NO: 1393 - protein, 174 aa, Homo sapiens [sequence omitted]

SEQ ID NO: 1394 - DNA, 1883 bp, Homo sapiens
aacgcgggcgcccgagcctgggcatgcgaggctcagaaaggtgcggggcatgtcaacaacctcgcaccctgcaaggtccgcgcgcggagcagcaaagccgtgtcccgcacccccgcgttcgcagactcgcacttgcgagttcttcccttctcccgcacgcgactgcgcccagggacgcaagcccaccaccgggacaggctcacaaagctccacgcagacccacaagtgagcgaacacacatctctgagcagatctgcgggggcagaggagcgcgcttcgctctttcctgcacccccagcctcctcgcctccccaccccgcccctcctccacctccccagcccccaagcccccaggcagccgcgcgccgggcggggcgagggcggggcggggtgtcgggcggcgccggcccaaaaggcggagtcgctaggcgaaggggccagatctgtgagcccagcgctgactgcgccgcggagaaagccagtgggaacccagacccataggagacccgcgtccccgctcggcctggccaggccccgcgctatggagttcctctgggcccctctcttgggtctgtgctgcagtctggccgctgctgatcgccacaccgtcttctggaacagttcaaatcccaagttccggaatgaggactacaccatacatgtgcagctgaatgactacgtggacatcatctgtccgcactatgaagatcactctgtggcagacgctgccatggagcagtacatactgtacctggtggagcatgaggagtaccagctgtgccagccccagtccaaggaccaagtccgctggcagtgcaaccggcccagtgccaagcatggcccggagaagctgtctgagaagttccagcgcttcacacctttcaccctgggcaaggagttcaaagaaggacacagctactactacatctctcacagtcctcaggcccatgtcaatccacaggagaagagacttgcagcagatgacccagaggtgcgggttctacatagcatcggtcacagtgctgccccacgcctcttcccacttgcctggactgtgctgctccttccacttctgctgctgcaaaccccgtgaaggtgtatgccacacctggccttaaagagggacaggctgaagagagggacaggcactccaaacctgtcttggggccactttcagagcccccagccctgggaaccactcccaccacaggcataagctatcacctagcagcctcaaaacgggtcagtattaaggttttcaaccggaaggaggccaaccagcccgacagtgccatccccaccttcacctcggagggatggagaaagaagtggagacagtcctttcccaccattcctgcctttaagccaaagaaacaagctgtgcaggcatggtcccttaaggcacagtgggagctgagctggaaggggccacgtggatgggcaaagcttgtcaaagatgccccctccaggagagagccaggatgcccagatgaactgactgaaggaaaagcaagaaacagtttcttgcttggaagccaggtacaggagaggcagcatgcttgggctgacccagcatctcccagcaagacctcatctgtggagctgccacagagaagtttgtagccaggtactgcattctctcccatcctggggcagcactccccagagctgtgccagcaggggggctgtgccaacctgttcttagagtgtagctgtaagggcagtgcccatgtgtacattctgcctagagtgtagcctaaagggcagggcccacgtgtatagtatctgtatataagttgctgtgtgtctgtcctgatttctacaactggagtttttttatacaatgttctttgtctcaaaataaagcaatgtgttttttcgga

SEQ ID NO: 1395 - protein, 183 aa, Homo sapiens [sequence omitted]

SEQ ID NO: 1396 - DNA, 1882 bp, Homo sapiens
aacgcgggcgcccgagcctgggcatgcgaggctcagaaaggtgcggggcatgtcaacaacctcgcaccctgcaaggtccgcgcgcggagcagcaaagccgtgtcccgcacccccgcgttcgcagactcgcacttgcgagttcttcccttctcccgcacgcgactgcgcccagggacgcaagcccaccaccgggacaggctcacaaagctccacgcagacccacaagtgagcgaacacacatctctgagcagatctgcgggggcagaggagcgcgcttcgctctttcctgcacccccagcctcctcgcctccccaccccgcccctcctccacctccccagcccccaagcccccaggcagccgcgcgccgggcggggcgagggcggggcggggtgtcgggcggcgccggcccaaaaggcggagtcgctaggcgaaggggccagatctgtgagcccagcgctgactgcgccgcggagaaagccagtgggaacccagacccataggagacccgcgtccccgctcggcctggccaggccccgcgctatggagttcctctgggcccctctcttgggtctgtgctgcagtctggccgctgctgatcgccacaccgtcttctggaacagttcaaatcccaagttccggaatgaggactacaccatacatgtgcagctgaatgactacgtggacatcatctgtccgcactatgaagatcactctgtggcagacgctgccatggagcagtacatactgtacctggtggagcatgaggagtaccagctgtgccagccccagtccaaggaccaagtccgctggcagtgcaaccggcccagtgccaagcatggcccggagaagctgtctgagaagttccagcgcttcacacctttcaccctgggcaaggagttcaaagaaggacacagctactactacatctccaaacccatccaccagcatgaagaccgctgcttgaggttgaaggtgactgtcagtggcaaaatcactcacagtcctcaggcccatgtcaatccacaggagaagagacttgcagcagatgacccagaggtgcgggttctacatagcatcggtcacagtgctgccccacgcctcttcccacttgcctggactgtgctgctccttccacttctgctgctgcaaaccccgtgaaggtgtatgccacacctggccttaaagagggacaggctgaagagagggacaggcactccaaacctgtcttggggccactttcagagcccccagccctgggaaccactcccaccacaggcataagctatcacctagcagcctcaaaacgggtcagtattaaggttttcaaccggaaggaggccaaccagcccgacagtgccatccccaccttcacctcggagggatggagaaagaagtggagacagtcctttcccaccattcctgcctttaagccaaagaaacaagctgtgcaggcatggtcccttaaggcacagtgggagctgagctggaaggggccacgtggatgggcaaagcaaacagtttcttgcttggaagccaggtacaggagaggcagcatgcttgggctgacccagcatctcccagcaagacctcatctgtggagctgccacagagaagtttgtagccaggtactgcattctctcccatcctggggcagcactccccagagctgtgccagcaggggggctgtgccaacctgttcttagagtgtagctgtaagggcagtgcccatgtgtacattctgcctagagtgtagcctaaagggcagggcccacgtgtatagtatctgtatataagttgctgtgtgtctgtcctgatttctacaactggagtttttttatacaatgttctttgtctcaaaataaagcaatgtgttttttcgga

SEQ ID NO: 1397 - protein, 205 aa, Homo sapiens
MEFLWAPLLGLCCSLAAADRHTVFWNSSNPKFRNEDYTIHVQLNDYVDIICPHYEDHSVADAAMEQYILYLVEHEEYQLCQPQSKDQVRWQCNRPSAKHGPEKLSEKFQRFTPFTLGKEFKEGHSYYYISKPIHQHEDRCLRLKVTVSGKITHSPQAHVNPQEKRLAADDPEVRVLHSIGHSAAPRLFPLAWTVLLLPLLLLQTP

SEQ ID NO: 1398 - DNA, 1949 bp, Homo sapiens
aacgcgggcgcccgagcctgggcatgcgaggctcagaaaggtgcggggcatgtcaacaacctcgcaccctgcaaggtccgcgcgcggagcagcaaagccgtgtcccgcacccccgcgttcgcagactcgcacttgcgagttcttcccttctcccgcacgcgactgcgcccagggacgcaagcccaccaccgggacaggctcacaaagctccacgcagacccacaagtgagcgaacacacatctctgagcagatctgcgggggcagaggagcgcgcttcgctctttcctgcacccccagcctcctcgcctccccaccccgcccctcctccacctccccagcccccaagcccccaggcagccgcgcgccgggcggggcgagggcggggcggggtgtcgggcggcgccggcccaaaaggcggagtcgctaggcgaaggggccagatctgtgagcccagcgctgactgcgccgcggagaaagccagtgggaacccagacccataggagacccgcgtccccgctcggcctggccaggccccgcgctatggagttcctctgggcccctctcttgggtctgtgctgcagtctggccgctgctgatcgccacaccgtcttctggaacagttcaaatcccaagttccggaatgaggactacaccatacatgtgcagctgaatgactacgtggacatcatctgtccgcactatgaagatcactctgtggcagacgctgccatggagcagtacatactgtacctggtggagcatgaggagtaccagctgtgccagccccagtccaaggaccaagtccgctggcagtgcaaccggcccagtgccaagcatggcccggagaagctgtctgagaagttccagcgcttcacacctttcaccctgggcaaggagttcaaagaaggacacagctactactacatctccaaacccatccaccagcatgaagaccgctgcttgaggttgaaggtgactgtcagtggcaaaatcactcacagtcctcaggcccatgtcaatccacaggagaagagacttgcagcagatgacccagaggtgcgggttctacatagcatcggtcacagtgctgccccacgcctcttcccacttgcctggactgtgctgctccttccacttctgctgctgcaaaccccgtgaaggtgtatgccacacctggccttaaagagggacaggctgaagagagggacaggcactccaaacctgtcttggggccactttcagagcccccagccctgggaaccactcccaccacaggcataagctatcacctagcagcctcaaaacgggtcagtattaaggttttcaaccggaaggaggccaaccagcccgacagtgccatccccaccttcacctcggagggatggagaaagaagtggagacagtcctttcccaccattcctgcctttaagccaaagaaacaagctgtgcaggcatggtcccttaaggcacagtgggagctgagctggaaggggccacgtggatgggcaaagcttgtcaaagatgccccctccaggagagagccaggatgcccagatgaactgactgaaggaaaagcaagaaacagtttcttgcttggaagccaggtacaggagaggcagcatgcttgggctgacccagcatctcccagcaagacctcatctgtggagctgccacagagaagtttgtagccaggtactgcattctctcccatcctggggcagcactccccagagctgtgccagcaggggggctgtgccaacctgttcttagagtgtagctgtaagggcagtgcccatgtgtacattctgcctagagtgtagcctaaagggcagggcccacgtgtatagtatctgtatataagttgctgtgtgtctgtcctgatttctacaactggagtttttttatacaatgttctttgtctcaaaataaagcaatgtgttttttcgga

SEQ ID NO: 1399 - protein, 205 aa, Homo sapiens; identical to SEQ ID NO: 1397

SEQ ID NO: 1400 - DNA, 62713 bp, Mus musculus
  misc_feature (1)...(62713): n = A,T,C or G
aatgaactcaagatgctaacacctttgttttcaaatttcaaatctctgagagtagcctttctctaattctgagctgtttcaaggtgacagcaggccactgttcccctgtctcagccaagagttggcctcagcactcgacctccaggctctgaggtggagtgtccagtgactgctccataggagggaagcatgagagattagcttctgggtctgtcagctttggcacatgagcaatatcctccgctgtcggagtcagttctcagtcttggtcatttctgttatcaccctcaagaagacttttttccaagtcagaagagagaaacagagacaggctcttgcatctgtccagcctgagcctggcagacatctcattactatctggagaccagagatggagaggggaggccgaggagacagctcccagatgtgtgtgtacttgatcccacatgtgttgtggctgtctagtgtgaaggagttttaatccaacaacatggctactctggcaagagatcacattcaaagaccttctaggtctgtgtggtccagctggaatacagacatacctttaatcccaggagacagatgcaagcagatctctgagttcaaggacagcttggtataaagcaagtttcagataaagaaaagctcaggttctgtcatggtgacacatgtctttaatcccagctctcaggagacagaggcatgcagatctctgatcttcagtcagttaaattcaaatcagtcagtggaacagtttagagttaaggagttgagaggtagtgaatagagtggaatgtatggcagttcagtttgtcaagttcagagacagtttttatggggacagttttacaaagagggttgcagagagaataaactagacacatggggaagacagaatgagccagagaatgagaaggagccagaagattagaacagattgccatagttagtttgaggccaagcagaacattttttttttcgagacagggtttctctgtatagccctggctgtcctggaactcactctgtagaccaggctggcctcgaactcagaaatccgcctgcctctgcctcccgagtgctgggattaaaggcgtgcaccaccacgcccggccaagcagaacattttagtgagaagctgacagaagtcagattgaatcagtcagcttggagaggagtttggggccagaacagctgagctgaaccagccagctagagcgcagaaataacgaggaaggatgatcttagcagtaagcccctgagaagacaattacatcatgtgaataaaagatacctttacaggttggggatgacagtactgacagccatggtagaggtagcaggtgagttgatccagtagataggataagaagaggcaataataatccgggcataagccaccaagcctaggctttggctgtttgctttgttcctgtggggctatctgtggggataaggactttgagaattgctcactggaacagaaaaggcagcgacctgaggaaacccactttctagctagagtggaggctctgaggattgacagttaatccttccctcaacactggaaagtccttacctggccctggtcagagggagagggtaaggccgactaggctgcagggagtaccagcatacgtcctgcttcctgtgatcaggagtgtgcacagggcaagggaagggacagggaggcgaggcacggggatggcccctagtgcatgtgacagatgacagttactgatgaactcctgatccttgtgcctcttcccccgagtgctgggagaatctcaggcaagcgcatctggcttcagttctgaacttccatgttagtggaagatatgtgggcatttgttggtggcttcttccatttaagttaagatctggcccatgtggctgctcacaattctctccagttccaggtgacccgataccatcttctagtctctgcaagtactaggcacacactagtaaagctaattaattaattaattaattaattaattaattaaacaaaatgtaaagattattcgtgctgtggcccagtattatcctgtcgtgtacacagagtgcctgtctccatggtgatggacatcacgggttcctgttttgactgttgtgagcagcactgctttaggctatcttatacaagtttagtgggatctatggtgtctttcctcttgggcatgcaccttgagatggagctgcttgatcgtatggtgactgtgatggtttgtgtatgcttggcccggggagtgacaccatttggaggtgtggccttgctggaggaggtgtggccttgttggagtaggtgtgtcactgtgggcgtgggcttaagatcctcatcctagctgcctggaagtcagtgttctgctaggagccttcagatgaagatgtagaactctcagctcctcctgtactcgataatggactgaacctctgaagctgtaagccagccccaattaaatgtcctttataagacatgccttggtcttggtcaggatgtctgttcacagaagtaaaaccctaactaagacagtgactgactctatgtttagtcataaaaagaacttctggtggtggtgcacgcctttaatcccagcacttgggaggcagaggcaggcggatttctgagttcaaggccagcctggtctacaaagtgagttccaggacagccagggctatacagagaaaccctgtctcggaaaaaaaaaaagaacttctgctgttttccaaagtggcaccattttgtattcccaccagcaatggataagggttccagtgtcttgtgcacatgtctaccactgagtcttatccctggttcctgcttaccttcctatctgacttgggttctagtgaagtaaaaagtttttaaatcctactacacgttactttaaagtcaataaacttagctcagtggaaccattttacaagtcagaaaagaatatagtttgtttaagaaagacacttttcataacagttaactgttaaataatgactaatgtaaataacaaagttctgactatttgattttgtgctttggggctttgttggtgactgtagtggctattcctggttgtcaacttgacaatatttggaatgaactacaatccggaattggaaggctcaccagtgaccctaatctggaggcttggagatccttatctggatattggtatggagatcttgagccatagtggctatggattccagaagattgaatctccgagtttaaggaacacacctttaatctgggctacgcctttcatctgggattaaaggtgtggtggaacacacctttaatctgggctacaccttctgctggagacaatataaggacattggaagaagggagtctagctcttgctcttgctcctttgcctgcttgctgcgtgagactgagtaactgctagatccttggacttccattcatagctgcgactgaaccattgttgggaattaggctgccgactgtaagtcatcaataaattcctttactatctagagactatccataagttctgtgactctagagaaccctgactaatacagtgacactgggtctcaatgagtagtcctggggcctggagctgctgctgccccgagtactgggattgaaggcatgcactgtcatatctggctcctttgttccttttgctgttagaactggtaataccactgtttgggaagtggaaactggagaaccaggagttcaaggtcatccttaacctcatactgaattcaaggtcagcatgggttacatggcacctcatctcaaaaattcatagctagatattagaataaaaaggttttttcttttcctaagaggggaatttccactgataagaagaaactagatggtaaatgcctctctttctgcctctccagggctagggttataggtgtgagcatgagcaaacatgtctggtttgttgttgttgctgttcttgacgttgttgcttctttagacagagtctcactgtacagccagaatattggctctttatgaggtcgggagatctaaactcaggtcctcctgcttgagcaggaagctcttagctgcctgagccacctcccctgtgcactcacatttcatgtaattgtgatgcttctttgcagttataaaaatctaacagtccaggtcatccagctacacagtgagaccctgtctcaagcaaacagaataaaataatgaaaacataacgtccagtgttacaggaggacctttataacaacacaatgttctgtaattagtgggaggcttataacttctttttgagatggttttagcagccccatctctgggggtgacgtcagctgacgatggtagagttgggtggaggttgctgaggatactgtaagcctccattgggagcttgagtctcctaggcaggcacttcaagctgtgctgccccatgtttgcccacaaaccccctctcagggagaaggcagcaaggtgtgtgtgtgggggggggggcatggaggatggcagtgtagtgggtgagtcctggtgtggtcacagatctgccagtcagcctggctttacctcactacttccctcagagctatctggcccttgtgacagatccacacacaggtgaggagagaatacagtgtcccttgctgagaatagaagcaggcctggaggatggtgtgtgctcttagcagactaggcctggaggcaggtttaaggagatttatttaaaaaacaaaaaactggtggggtagagtgtgatgatgagtttctttaaccccagcactggggaaacagaggcaggagggtcaagaaaaactcaaggccagcctcagctacctgaaaacctgtcgaaaaacaaacaaacaaacaacaaaacaaaaacctcactcaaacaacacccccacctgtaaccaggatagccggtgtcttagggctttactgatgtgaacagacaccatggccaaggcaactctgataaggacaacatgtatttggggctggcttacaggttcagaggttcagtccattatcatcaaggtaggaacatggcagcatctaagcaggtgtggtgcagaaggagctgagagttctacaacttcatctgaagatggctagcagaatactgacttctaggcagctagggtgagagtattaagcccatacccacagtgacacacctactccaacaaggccacacctcctaatagtgccactccctgggccaagcatatacaaaccaccacagctgggattccacatctgttgtccacattcatctttagaaaacagttcacttatgaagtcctcggtttccttgtcaaataagcaagagaagcagagcctaagactacaaaatcccttttggagaagactaaaaacaatcttacatcttttctttattctttaaggcttctaataggcaaactttaaggagcttaactttaggtaggccagagggtgaacagcctgaagtcgcagccctggggaggtgacagcagtagggttgcaagtctgagcctgcctgggctccaaaaggtttaattttttcaggtcaaaggtaagatgggcttgcttgctggttgagtcagccaagggtttctccctctaggggacatgaacggtagctgcacttatgcagaagggggattgagtctgggggccccaagaagcgtttccctaaaccaagttctataactccctcttccctcctgtgcaactcctcagtgcctgctgtggtgggctagacaggtgtcccacagtcagtcctgtgtctactgagacctccctcagtgagagtcctggaccagacctcagcctagtcttgacagcagctatggagtctttatcaaatcacttcacctctctaagcctatctgactctcaggactgagaaactcaaaagcagctatattcttgagaaagaaaaaaaaaacaacaaaacaaaacaaaacaaacaaacaaacaaaaaaccttgcacaatgtcccaagagaagtgccctggtttggatgtgaagtcctgtgttcctttgctgcagtcacacgggcttgtctgaattccctgcacagggtactttagcctcacctgccgttcatttctgcttcctggaggccagatgtctccattcccaagttgagatttatctgatacactgttacaccaataggagggtcttttcctggagttggcaggcacccaggaggggctggtaactcctggggacaggtagcaggagtctgacttggggtgggaggttcatggggtgggggttgtcagcaaagctcatacacacaggtttgatttctctcctccttaacagtgttgtcgtaacaacctggaatgttggctggaaaactgaacttccactaagtgtagagttcagacagcctccaaggaggaaagagactgctcagagccctgaggaatgtctttccttaccttagatagagatcttcagtatgtgttgggcccttcagcaggagatgcagagatgagttcttcagggtgacagggaaggcagggtggtaaacaaagtcacatggcatttgggaggaacacaggactctggcacccaagctaaccagtggatgacagctttcttggaattgaggaaagagaccattgagttttctgaaaaagacagccaagtccaggtttggcttttttttttttttttttttttttttttttttttaacttgtggattacgttgggcccacacttggggtaattttatctttccttcctggatactgaggatacatgtgttcacagctatgcttggctttttttttttttaatagggtcttgtccagcgtggccagaaccttgccacgtttcccccttagcctcttcagtgccagaattacaatcatccaccaccgtgcctgtcagagacgagtgtgagggcagagtagggtgtaagactaaaggaaaggaaggcctggccagaggataagcttgaacaaggcatgcagattaaaaaccacggacatcattgtagaaacttacctacacgcaaggctctggtacaggaaagagggtgggaaagtgaaggtggactctctgtgtagccctggatgacctggaactcactctgtggaccaggctggccttaaactcacagagatatgcctgcttctgcctcccaagtgctgggattaaaggcaggagccatcataccaggacttgaagcacaacactaatactttgtatattataaattcttaccacacaaatcagtaaaaaaggctctgagatgaagtagaaacttgagttctttggaaagtcagttgtgtggcatggtattttgctggggcaaacatgtgacatgaaggagtattttcctgaagcagacacaaggtaaaaggatgttttgctaaagcagacccgtgaaaggacccatgatgtaggattcttctctaactacatgcaaggatcagttcaccttacatttcattgttgagctccatttgttgtgactccatagagagaaacatactggaaacgtttctagtggtgttctggtggcttcttgctgcttccatggactcgggcagagtgatgtcagctgatacagactcaagtggagttttgctaagacagactcacatactgaggcgagacccatttgagaacacgttatgtttggagagcggataactaagactcaatggacagtgggaaagggcttgcttgcatagctagctttgcaatgcttcctggtcttcttcgctgatcttcactttgttaagagaagtaaggcaaagaacttctccaggcctaatcactcctgctaactcatgcagattcggccgaggcctggctgtttctgctaggttgtgccaacactgctgttgatttgtgtttgttatcctgacactaccgacctggactgctgctatattcatcaagtatttgcaagtggatgggatttgctccaaagaacaatttctagacagatccacctcctaatatcctaactacctaattcctgtatcctaataactttccatttccactgcctctaggagggaggttaaagtgtttaaaaaccatcattaaaattagggttgagaaatatctaaacaacacagagaaattaactataacttgcccaaatcctacagctatcaagcagtagacctgggatgggaactaaactcatctgactatggaacacccccccccccacactccaggatcaaaacggggtggatggggggaagccacttggccagggttgccgggtcgtgtctgagatgtctgctcttgccttcaacattccttctatctgagctggcagccttctgtagccttcctgtttcaggccagcaacttgtctctctgcaattattttcaggtctctgtttaccacagaaaggaaggaggcagcacaatgagagtctgttggaaattaattatatttttaagatagggcaagttccactatgcttgcctcgaactctggatcttcctgcctcagcctccagagttttgggattacaggtgtgtactaccacatcctcttgctatttaatcccattttaaatagcaggagaaaaaaatatgtattttttttagacagggccttagactcacagctattcacctgcttctgcttcccaaatgcctgccccaccacagggagagagaacaaccatgcctttctctccgacttatagcgtggctgaggaagtgccatcaaaaccaatcccattgtcctgggtacaggtttggttctgacatccacagagagcggtggatgcctaggtctgaggccagcatgttgcttaaataaggtcatgtcttatttaggggttcagccagcacacacacattccagttgccccatggactctaatcagctgaaccctgaaatggaagaatacattaaaacatactggtgtaggtccagggctccccatctacattttcttttctttcttttttttttcttatcccttcccttctccctcttgctccggcccggctcgctcaggcccataggttttatttgtttctcattacagatggttgtgagctaccatgttgctgggatttgaactcatgatctccggaagtcagtcagtgcgtttaaccgctgagccatctcaccagccctaaattttcttttcagtgtgtttctttccctctgcatttgcatgggaagctgccctgtagcttcaagctctgtagcttggaagggaaccttggtggagtctggtaaatagcaaacgccggttcctttgtgtccagtcaagtcatgatgggtaatcaaagccctactccttgttgagcagttaggctccaggtacatcgacagtgtttccaggaatctttatcatgggcttaaaaatacatctctaataggtgagaaaactgagacttccggatcgggatagcaatcttgaggagggtaacacatgtgtctctgggccagactcaaaagcgcacactggtttcgttgcctctgcagtagccttcaaagagctgctcctccactggaagatgagaggaaatctttttctcaggttatggacgcctaagttttccttcagaccaattaaatcacaatctctgggctcgaagcagacatcggtgtcttttcggattccctgtttgattcccgtaagcacccaggacactgacctgccttctactttaacagccagagccactggctggcgctcatgaaagcaaaactcaagcggaggcgcggatggaaggaaggagggggatatttctccttatctcagcgtcaaaacctggggaggggccctggtgggggtccctgggggctcaggtgtggcgcggctgcaggaagtaaccccctccggtggcccggagcgctggccgattgcgccatcctactgggctttcgtaaccgcgagccggggctgccaagaggagcttcagcaccggttcctcaaatgtttcactgttgccaggacggccggctgctgtgtgtcacgtgcatgtgggaagtcgcgcccacaccgatctgagccacgccggggcgagcgctcgcagtgcgagctgagtgtggagcccgaggccgagggcgactgctctcgctgccccagtctgccggccgcccggccccggctgcggagccgctctgccgcccgccgtcccgcgtagaaggaagcatgctgaccgtcggctgcacgctgttggtcgccctgctggccgcgcccgcggtcgcgctggtcctcgggagctgccgcgcgctgggtaagaggaacccggagcgggcgtggggaatgtgacactgtctggttccgttcgcagagtgagccccgccggtaccggctgctagcctgggctgactcacctgtgctgacgcggtggaggttcgcgcgccccctgttgcgtctagcgcctataactgcgtgctcctgtctgtgtctggccagttacctcaagtctgagtacaggacagtgtgttttcctgaaacctgactctggtgtctggttcccagtgttcccagtcttactcaactgcatcccgggtcgctccaaaaagagatacccagagggcgcgccctagtggaacagtagtagtcccttctggagagtcctttatgccactggctctctctgctttagttgtggcacctcgcgtggctttccttagttctactacattccatgtcgtgtgtaatgacagtgacccgacggtgaagggtctgacatcatgggctctgagtcatgggtgttcccgcctcacaaacttactcctttagccaactagccctagcatgcagaatgccaacacccacatccatcccaatcctgtgagtttgacagcaaaggatgtgggacctcttggaactgtgcctccgccccctgccccagccctccctgattagcaggtggaccaggcggagggtagggtaggggcactgtgtttaccttccttgcactctgccttgtaggtctaggcctctctgtgggctctggcttcaggcccagcagcctgcctggtctcttctggaggaactgggagactgcttctctacaggttattttaggggctgagggcttattcaacaacatagaaagagccaaaggacatgggggagatttatcctgtgctggtcgtggggacagtggcttccaggctttctttctgcctggaaggtagaattcctcaagcttggtttgttacccctacctatattttctttatatatatatatataaagaaaatatatatatatattagacaggctctcccataacccaggctggcctcaaacttgtgcctcttctgcctctatctcttgagtgctgggatttcaggtattaacccaccctgtattttacacgtttttaatcctctacaggattgacataaagctttgggaggagcctgaggttcagagagatgcaatgggaagcatcaggcccctccgtgtctcagtgttctcctgtgggtacagctgagggcgtctggggtaggctgagcaccactatcatctggtgggattctgggggagaagacactgatgaaagagaagatccccgcttagctgttcatggtgccaggcaggactgaggtcctctcttccatcttgggagagcaggactgggcctctctgcctgtctcagttactactcaacataccccagcgcccccaccaccacttccctttgttcctaaggagctgcaaggcacttcggagacagcgagttctgttttcctgtggttcagaaaggacacccaagggtgggggtgtcttctgacccaaacagcctttagaaggcagaactgggagtctggggaggaagtgaaagccctgccagtttagaaggaagaggcagagaagtccccagcccatctcccacacccacacttgcacagctacaaactggagagtgacaatcaagaaacaagcaccaaacaggaagtgtggagcaaatgactgagatgtttggctttagagaagtgaggccagatggagatggctctctgggggggaacccatgggtggaagatatacataaacatatatatatgggcaggcgagatagctcagcacacgcacacacacacacacacacacacacacacacactctcctccatccatcatccttagtgggtttttgccttcatgtattcatgtctgtgtgagggttccaaatcctatggaactggagttacagttgtgagctgccatgtggtgcagggattgaacctgggtcctctggaagaacagccagtgttcttaactgctgagccatcactccagcaccaacaggtgggattttcatagtctgcccctccagggcctgctaggactcctgtgtcttcttccacctggggcccaggaccagctgggactgaggcttctgccaggtcaaactttctaggcgctgctgactgaggacaggctgggcatgggtggcttcagtccccctttccttctgtaaggcaagaaaacacgcagcagcaccgatgcctatgtatctaaatctcctcctgacttctgaattccctctgggacaacctctttcggtctacaaaacctacctgtattcctagcctcaccctgaatcagtatttttctgaaggatatattttttatctagcatcaaatttcggctaggaaggatagatctttgtaaaaaaaaatcacaatttttaaaacattagggtttgtgggttttttgtttgtttgtttttttttttttttttgatattttgagacaggtgtttctttgtgtagccctggctgccctggaactcactctgtagaccaggttggccttgaacttagaggtctttgcctcctgagtgctgggatcaaaggccacggtacccaaccaaaaatgacaattcttgacccctggccactcattaaacatgtatcagaagagcagagagtgaggtctacactttgaaaaaaaacaaattgttccttgtggcccctgggcactggcttgaggacatttgcctaatggtcaggatgagtaaaagaccttcttcccctgccaggttccctgtgaccagaagcctctccccgccttggctctgcccctccccttgtttattcgttgcaacacatatttatgtattccctgtaaagcccttggggaccaagtgggatccgtcatgcacactccaccctataaaggatcctgaatgtggccaaaagcaaatcctgagacagagccagttcagtctctctgacctgacactgggtaccaactctccagggacagattgtctcagcagtcagctagacagaggaacccttctgactgggaccctaaagcaacaggagcctgcctgttctctaccccatctgactggcatcaaactgtgcaggcgcaagtgtggccatagctgggttatgtaaacaaagtaacttcagagcttctggcttcaaacagatgtctccttcagcaagctttccatctgcccctgcaggcctgagtgccaccactcagtcatcagcttgaatccagggctaaagctatctcagatgagccagtaagtgagtttaagctattaaaccttaaattaatagaaaaagtaaaatgggcacatgagatggctcagcagataaaaaaaggcatttgctgnnnnnnnnnnnnnnnnnnnnnnnnnnnnnnnnnnnnnnnnnnnnnnnnnnnnnnnnnnnnnnnnnnnnnnnnnnnnnnnnnnnnnntgttactcccaagggtttctgtttctctggcctctacatatgtactgtggctagtgcatgcacataaacaaacaaacaaataaatgtaattaaaacaaaagctgtgtatggtggcacatgcccttagtgccagaatctctgtgagtttgtggtcagcctggtctccacagcaagttcaagaaagaggaaaaaagggtgatttctagatgtgcttgatggtgtaactcatatgggaacttgatgcagggggattgcaagctctaggttagcctaagctacagagacagggttggggtgggggtggggagtaggggaaccctcaaaaaaaaacacaaacaaacaaacaaaaaccaggacaaatctctgtccttcatcacgcctgtcacttgcagtgcgcagtggctagctgtggctggtgtggctgtgcatgtctgctcatggggctttcccatagcggaggggaagtgtgtcgggtgaggggctagagagctatgcggtgtcttccagacacctgttccacctgtatgcatggtgctctgagggggcattggagcctctggaactggagttacagatggttgtgagctgtcttgtgggtgctggggatcaaatcctgcttcattgaaagaactctctctttttggagacaaagtctcaccacgtagccctggctggcttggaactctctgtgtagaacaggctggccccgaatgcacagagagcctcccgcctctgtctctcaagtgatggaactaaaggtgtgggctcaggaggtcatcagtgacggtttatcagtgagctgtcatctttctagtcccagagctgacgctttacctgaacctcagcagctttcaccattgcgcttgtctcttgccagctctgtctgcaggtttctagcacagggtgctcctgaggccccaacccaggagcccgttctctgactcacttctctccctacctccttccagaaaatcattctttgggcttccctttctgtggtggttacagtaactgtggctctgagtatcaacttcatttgaaaaattgtgtcagacccttggcacaacagtgcagctttgggtgagtggggtgccagcccgctcttggctggacagggtagctacaggacagcaggtggggttggatgagtgatcagaggccattctggggcatgtgggaactgagacatctatagcacaaccaagaaaggatgctaaatcaggtctggtggactgcaggtttcttatcacagtactcaacagagagaggtagaagttcaaggccagcttaggttacatgagacccccggaagtaaagtgtggggagagaatgggagtgagaaatgcctatggatccctaaaaggagtcagcaggaacttgggagtgagacctggacttgagagtcacctacaggcaaatccctccatacacacacatccctttttctcttctttaaacagttgcctcgtgtttcccctgggactgaccttggactcatgctggccctgaatgcacacagatctgcctgcctctgcctcctgagtgctgagattacatctggccagatgttactttaaacttttagaattacccagcccagcctgctcaacaacagaaagaataggactcaggggccggagctgaggtgctggaaccttctgatcagaggagacagaattaaggaagactgtgaccatgaagtgaacaggatagtgtaaggaggactggtgtcttgagaacccaggaggacactgtgcccatgagtggagtgttctttttgtttgttttgttttgtttgtttgttgtttggtttggtttggtcttttttccagacagggtttctctggtgtccttgggaactcactctgtagaccaggctggcctcgagatctgcctgcctctgcctcctgagcgatgggattaaaggtgtgagccaccaaccacctgctcctcctcaaatactcctgacaagtcaggcaggctgacccaggcttgaccagtgggtttaacaacaggcaggccactgttgttgactttggtctgtggagctttggaggaatggtgggagccaaagacaggcagagagacagcaggcctggtcagctcttttgggatttcagagcatatttgttggctacagttcagttgacaaagaggagttttaaacagactattgagacaggtgtgcgggaaggatccagggacaaaatgattgaaaaaagtaaatactggccgggcatggtggtgcacgcctttaatcccagcacttgggaggcagaggcaggcggatttctgagttcgaggccagcctggtctacagagtgagttccaggatagccagggctacacagaaaaaccctgtctggaaaaacaaaacaaaacaaaaacaaaaacaaaaaaaaagtaaaaactggtggaacaaagtcctcgagtaagtagtgaggagacaggggcccagaaagcctagaaactggtctgcgatcatacagcaaggttgtgacagaccgaggtctgtgcctgcatttgagtttttgttttatagtgtgtgtgtgtgtgtgtgtgtgtacaggcaggttcacaagcacatatgtgcacatatatgtggaggtcatatacaagacacacatgtgaaagccagatatggtcactggtgtcttctattgttctctggtttatttttctagacagggtctctctggccggccggccagcttgggggaatccgcttccctcggcccctagtccttgtaccttcacttggctttcagaacacacacccttgtgctctgctttttgcacgagtgctggggcctgaactctggtgtgtgtggccagctttaccgactaagccgtttcctccgcccccgcccccttatattatatatgtgtattgtcaacaagcacaactcttccagggcacaggtacaacaagatcatttttcttcctggtgtccttattagagacttagggatagtacactgatgagtgtcaccaagatgatccccttcctgtcccaggaagttcccattgccttcttctaagaactgaagaaaacactcctggctgtgatgtgggttcgagctggtgtggtctcctctcaccctgccctcagcatccattcacatcacttttagtccgggggaggttttgtaagcacaatggactcttccatctccaggagaggccccctgggctttagggtttagaagcctctggggatatcactgtagacctccaaagacggaacagtagtttctgatactgaaacaaaccaaagtagagcctcagctgctgccggtcttatgcgcctgttttgataagaggcagaggctgtggtgtgaaggctttgtcgcaggagtgggaaggaggccgcagttaataatagttacagttcacacagcagctcagatgggtgaggttaggtgtgtcctgaaagcagcgccgagggtttcacctcagccctgacatgagagtaatcctcacagcaacattttcaggagagtacggttattatcttcgctctgtggctggagaggtagaaagtcctagaacttgctatgtaaaccaggatggccttgaacttgcgataatgcccccatctctgcttcccaaattctgggattatggatgtgtgccacctaaacagagtttatttatttattcactttagatatttcattatatgaatacatccacttttttgcccagcccctttcctacgttctgggcatggaaacaagggccttgctcaagaagggcaagcatgctgccaactgagctattcgcccacacccaatctctttagaaggacatttgaccacatcccacagtgctgttgcagacagtcctgtgggaatgatttcagcacccctcgcacttccaaagcatacccacagggtaaaggcctccagggtaactgacagttcaaatgcccacgagctttgtaactggaaaaggagaagtggtgtcaatttatgctccagcaaaatacaagcacgcccatgtccacaaactccctcggtgtgttattaaagtggcatctggtccagcatggtggcccacacctttaatcctgcactcagtaggcagactggatgagtctctgattttgagaccaacctggtctacagagtgaattccaagccagcagggctacaaggagaccctgtctcaaaaacaaaacaaacaacaataacaattttaaaaaaaccaaaaaaacaaaataaaacaaccaaacactggcctctcccaagaacagtctgtgctccttgcacacagcttctctgagtgaggctggatgggtgtttccctgtgcagcagacatttcataacttatttgcataatctgcctgcttatactgctcagttttgactgagctgtgggctttttcatattgtttacaaagctcttactatataaaggaacttggtcttctctgatccaagtcgtaaatattttccagtttgtcttttattgttctgatagcaaagtttttttgtttttccccacgcagatttgcttttgctttttttcattttgttttttaaacaaggtcttgctgtatagcccaggctagcttcaaacttccaagcctccgtctcagcctcctgagtactgggattgcaggaatggcccaccattctcagcaagattgttcttaaagctacagctgaatttatatgacctctgaatttctgtcatgtttagtgagatcttcttcatgccaatatcattttattttatttatttattttttaaaaatatttttattaggtattttcctcatttacattgccaatatcattttaaaagattctttttttccctttatttccaagagtttacaattaaaaaaaaactgcacctatacatctagcatttgagaaacaggattacttggagttcaaggccagctaagttacagtgtaagccctgtcttcaaaacctaaataatgtgtatattttaaagagactggagagatggctcagtggttaagagaacatactactgttgctgaggaccaagttgccagcacccatgatgagtggcttacaactgcttgtagatccaactgcaggggatctgatgctgtcctcttctgggatctgtgggtacctgtactcatgggcattaacacacccacacatctataagcacaaatatacatatacatatacacacacatacacaacacaaacatacacacatatggacacatacatatatacacataaccacacatacacacacatgcacacacacatacacacatacacatacacacacatacacatacatacacatacacacatacacatacatacacatgcacatatacatacacatgcatgtacacacacatgcacatatatgcacacatgcacacatacatacacacacatgcacacacacatatacaacacaaacatacacacatatggacacatacacacatacacataaccacacatatacacatacatacacatgcacacctacatacacatacacatgcatatacacagagatgagggagcgctgctgctccctccgtaatgcagagttttctggttctgagagacctgctggggctaattcataaagaggctgagctggggctgcagagctgggcacctagtgtgctgccatcaccaccagtctggactgtttgttttcaggtggtgtgtgtgtgtgtgtgcacatgtacgtgcgtgtattacatgttactataggtatgtgcacatgtgtatgcagatacagatacaggtgtgcatgtaaaagccagagatagacagctggggaggggggggtctttcctccatgattttgtgccttttttgagatggcggttcactgagccaaagctcattgattctgtggggctgactggacaaaactcatgtcctcatgcagacactttgctgactgagccattctgctgaccccagggctttcttccatattgttctttatcaaagacctacaaaacagtgcttggaagtctcctgtttccttctttctcttttcacaaacatggcagcaagaggaaaatgcaggagccagatcagtctcataacggggtcacagggaccctggagatgggcactgagctgtggctccctccatcctgctagaatcttaggaagagagaaacaggtcccaagccgtcagacaaaaggagctgggcggagagagaaactcttcagatcagtagccatggagggagggtgctgccaggcaccgtgctccaaacactgttgtctggatgctggttgccaaggcacagcaaggtctacagaggttggatggaagagaggggccagggagggagggatgatgaaggaggcatgtggtttcctgagataggctccaccaggcaacccattagattctccaggaaggcctccgggggtcatcctcgtccttgatgcccccaactgtccccagcacggtaggtaggcacagctcatactttcaatggcagggtatgtggctggccaatgtctacctaagccatcaccaccttttgatgctgcttggccactgtccttcctaactctgggctcaggatctttgttgtaagtccatccctggatgtgacaaggtcttctctttctcttctcttctcttctcttctcttctcttctcttctcttctcttctctcnnnnnnnnnnnnnnnnnnnnctcccctcccctcccctctcttctcttctcttctcttctcttctcttctcttctcttcttatttagtggacccacgctgtgtattatctgagctaggctgggctactactgtcaagataccaggacttttctgtgggatctaaaggaccctggaagtgaggggagcctgctgacccggagggagattcttagtggtggaagtcaggaagcttcaggagaaatgcagtgtgacccgagggagggatggctttcctccaagggcactcatctcatttgactcagctctagagctttgattctccttttgaaggggtgggcatgggagctgggggagggtgaatctggtagatttgccttgggatgtcttaagagagatatgtaaggttcctgcttaccactttctaaccaccttccagaaacatggaaaccctgactgtggtccaggttcctggttagatcctaagactgtggtcagaaatgggaagagaaacccttttatgatgaacttctaggaaggctgatggctgtggggtgaacacagactcagagcccagagctcagggcgtacttttggctacactggtctggttctctatggagcaagaagtggatcaagaatccttaggtttttgagtggtccctgtcttagcacctggatcctgctgcagcatgtcctcacagtggtttccagaccaacgccacttgagtccccgtgacagggagggcctcctctagcctctaatttcttctttacttaatatggggcagatgggggcagggcagcaggattgctctcagatatctctcctctgactagttcacactcttggagagataacctgcccagaccttcttggcctggggccatacgctgatctctgaaggctccagggaacccagtgtttttctgttttggagctagtcccatcatgagtctgagtgagcacccagacttacttttctgtgggtccacaggagcttctctcacaggcctcccacgcatgggtgtatggtccacctggtagatggggagaaaggctgagccaaggtaaatactgactctgtcaaatacaaggtaaatacaagcaggtacaaggagtacaggcccattagtaggctgcagggctggtgtcctgccaggagccattagtctgagaaatgtttgagagctaactcagaacagggcaaggcctatgacacagcctggagtgttgtctgcctggggcccgtaggctgtatcttggaggagtcacggagaagaggtcccggtgtggggcaactagggagagaaggggattcagaggcagaggagaggcaccacacagttgctgctagcacagggcaaaggaagaggactctagccccactcccggggtcctcgaggtgtggtaggcattgaagagacctctcccttcccctcacctgtcttcctcagaactcaggcatccacaggctcgatgaagcagggaagatatggagagagaaagcagaggaggggaaattagatcagggaaacaggatagtgagcagcctggggatgtgtgtgtacatgtgtgtgtgtgtgtgtgcgtgtgtgcatgaatacatatgtgtgcatgtgtttgtgaatacatatgtgtgagtgcgtgcatgcatgcatgcatgcatgcatacgtatgtgtgtgtgcttgcatccatgtgtggagggtggtggtcagagagaagcccctggggtcaggtgggagggaggctggcttctcccaactcatccatgcctagtgtgcatgccccttcactagctgtgagatttggggtcagttccttaacagtcccgtttcatttttgagagaagtcctcactctgtagcttaggctggccttagacaaactcataattctcctgcctcagccttccgagtgttgggatcatgggccgtatggtgcctaacttggttctttaacttcactaacctgttgcctcaacagtgagtcctggagtgggaatggtgacaacccctccacacttcccaagcccttcacacttcccaagccccccacaccaatctccttctttttctgtcttttttctctgttgctttgatactttgattttaaaaattattattatttttttattaattaatttatttattatatgtaagtacactgtagctgtcttcagatgcacctgaagagggcatcagatctcattacgggtggttgtgagccaccatgtggttgctgggatttgaacttcggaccttcggaagagcagccaggtgctcttacccactgagccatctcaccagccccttaaaaattattttattttattttatttttgatgctttgagatagggtttcttcacataaccctggctatcctggaacttggttagttgaccaggctggcctggaacccagagtttgcctgcctctgcctcctgatttctgggattaaaaggcatgtgccaccaccacctggctgcttttttttgtttttattaaaagaaattattttcatagaatatattctggttgtgtttttcctttctcccaacaattttcagatcacccctactccccaactccatattcttttttctcttcctctttaaaaaacaaacacataataataaaaaaaagaacccacaaacaaaacccacgaacacttaaaatcgcaaaaccacaaaaccagaaaccaaaatatgtaagcacaagaccaataagaccaaccaaaccaaaccaaaataactcttaagttaaatgggaccaaaaatggctacaaaattacccttgagtccactttatgttggccacctgctcctgggcatggggtctatctaccctgaagtgggaaagatgaacttttcctttgcaagagtgtactaaccgctgacagctctcggttagacgagggagctgtccactttcccctctcagcgcccgttcccatcaggcttggctatgcaggccctgtgtatgctgccacagttctgtgagttcctgtgtgtatcctgttgtgtctggagggtaccgtttccaaggaaacacctctggccctgacactctctccatctcctcttctgcatagtcccctgagccccaaggaaagagtttgatcctatttaggactgagtgccccgaagtctttctctctctgcacgttgactggttgcacaccatccaattgcatggccactcccttttagatggagatctttagtaccttgagaggactttcagtgtggatgccctgcaacccaagaggccagtagccaccacttgggctgcctgaagtggggccatggggtaggattagcaggcccatgttaagcccatgtcctcagtgacaggccaggcagctggttcactacttacataaacagggccaggaagctgaacttgtttttgctggcaagagcagcagtagcttcgggagaagttgagaaatatgtcattgtgtgcatacttttctctctggctattgacatttgcaagtttacatgaggagggagaggagctggggcaacaacaacagcaacagcaaagctctttggctttctggaaccagactttatcctagtggagagagccccactttccaaagttatgttttgaagtcctcagttgggggtgaggggaggaggcgtctactgtggggccagtgtcccagagagagaatgtaggccacacaggcagggaagcaaggaaggtagggaatttccctcccctagagctgtcacgggagaggaaaaacattcgtctgagggtcctggaacagcctagtcaccaactgtcccccgacccccacccagtgatcacccaatgaccatccacagatggatgatgtgtatgtttcaagttgggcattgcctgtgggaaacagaggtccctctgagaagtaatgactggggagtgatgggacactagataccaggagcaggactctcaggggcccccagaccactgtctgaactctcattgctcagagaaggcaaatgggccccatcaggggtctccacactgcctaaaactcatgggtaaggccaggtgctacatgcttacaatttcagccttttgaagcctgcggcaggaggatcactatcactctgaggccagcttagggccacatagcaagagcctgtctcaaaaatgaacaaaactaggcaagacactatagaagcctaaccctagccaaccagccagcaactaagctgtggctagattacacaccatgtgccccaaggggcaaggacacactttgagaaactggcagggagattctgcattctttcctgattttagtcccacctgaggtacttctgtcctccctgcagagtcttgttaggagcctgggacgcagtgacatgacacgttcctttctgcatgtgacatgccttggcaagggccaggaagactcacaatcctcaggtgcccgtcttcccttgtctgtgatgctctatgatgaagcaggagctgggtgtcgggagctggttcctcctcaaggtcattgcagggagaaacagaagcaggaaaagatgtggccgtcgtcatcgaggctggtacgggaggcagactggagcctggtctgcacataccgtagcaggggcctcctctgtcagcagagccagtgctgatccatcctcttggagggtctcatacaccgcctcttccctgtggggctcccttcctttcttgctgtgtaaggagacttcagaccccagccgtcccccaggtggctcccttctgaattccttaaatgtactgtgccccttttatgaactggttctgggcaatctgcttatcaaactcccagtggtttctcaaggccttctaaagtttctctttgccctctagaacgatttatttctcctctctgttctcagcatcaggaatatattttatttccaaatagccaggattgtgagtagttttaaggcccccaggaatctggagattggacaagatagcagtatggaagagtggggagaacacagccacagcgtggagcagatgtgcagtggctgctaataccctctcctggcggagacgtgtggcctcgtgtgcaacactgcatggaaaatgttgaatccttcaggaggggacaggtttaagcttgctgcctgactgtcacaggctgaacagttgctcaagggcagatgttgtgtgctctttgctgaatctcatcctgtgtagcagctgccacacctcacgctgccttcagggtatgggagggatcctatggtcactgggcctgtctcacaggaagagtgttcccggagtacaagcccacctgattccctgctgtgcctcctccagtggggtctactgaggcgaagtcctggccaccttcaaaagtgcgagacatccagaaaatggaggctgagcccaaagatggttctttttgtcccttccnnnnnnnnnnnnnnnnnnnnnnnnnnnnnnnnnnnnnnnnnnnnnnnnnnnnnnnnnnnnnnnnnnnnnnnnnnnnnnnnnnnnnnnnnnnnnnnnnnnnnnnnnnnnnnnnnnnnnnnnnnnnnnnnnnnnnnnnnnnnncccacccccttcaccccaccccatgtaatacctgggatccgtatgtctttgtttaaagaaaaaaatatatgagcaagattagactctttaaagcctgagaaagccaaattggtgttgtgcctattgtcccactcctactgaaggagtagggtgggtctctttagccaggggttcagagccagcttggggaaatgtagttacacctttgtctcagaagacaaagcaaacgtgcaaagctctatggaagagcaaagcaagagaaaggagaccttggtatcccatcctctgcctgggcagacagaggttcagggagggtgcttctgagactttcacattcgctgttcaaaagctgctactgaggctatctgaccactatgcaggagctaagggctgactcagagctgagtcaggaggccgagcagtgggtgggtgggaggtcaggctgtccctttggactggcaccgagctcttttgtcctggcctccccagtgagaacgtccttttgatctttaggcacaccaggtttctgagatcaaagttaaatacagtgggtttttttttttttccacagtctcagaagaaatatgtttttgaagcagggctgacgggcaccatttgcagatgggtttttataattaattgtcccggatttaaaaaagacagaaggaaagaaagaaacgggtgactcagttttaaagattcagaagaccatcagtcaagttccgcggcaggggaagtaaccattgtctgctctttatggctctgcttttgtgggaaggaaaagaaagattgtttgtggggaggggtcggtatttctcccaattacctgaataaatttgtcattgttctcaagggtagtaactgaacagtcctggccaatatgcaagttagtcaccaaccatgcaaaggtttctattgggagggaaagggatagggaagtggccagaggaatatttttcatggaactgacaagggcaggagcagaagagaactctgcagtgtcccctagctggaccccagtgcagggtctgcccactcggcttcatggaggactctgcttggaccaccggtggttctgggtgaggtgtggaggccttgtcgtatttcaaacaagcatggaatgagtgccgttgtgttccctggtacgaggcaagcaggaccttacggtcttacggtcatggctgcgtggtgacctgtgtaggcagttatgcatcgcttcataatggggacgtgctctaagaaatgtgctgtctgatggttttgttgatgtgcagatagagtagttacccaatccttgatattttggtcagtgacttgatgtggtctctatcacgaggtgaggcaagcagatgtaccacttgccagcataatgtggcatactcttttatagcaaaattttattattctatttaaaattgtgtgtgtgggcatgtgcacacatgcatctggaggctagcaattggcctagggcgtgttccttagtcactctccaccctatttgtttatttttcagttaaaacaaaatcagatctaaagccaggcagcagtgggacatgccttaatcctggcactcaggagcagaggcagaggcagaagcaggggcacaggcagggggatatcccagttcagagccagcctgtctagggggaaagtcacatctgtttatctaatgtggatacacatacaccatgacatgaacatgaaggtaggaggagttggttctcgcctcctaccatgtggagtctgggggccaaacgcaggttctcaggcttgtcagtaagtgcttccccagctgaggcatcccactggcttctgccacctcactgtgacagtgtctcactgaatctggagtgtgccaatccagctaggccagctgggcagcaagccccagggattctcttgtctccagctctctagctcagggatgacgggcgcttgctgctgtgcctgggtgtcacgtggggcttgggaatcaaactcgggtccttacactcagtgtgtcgaaccattttcccagctgtatttaaaaaaattcgtgtgtgtatatgtgtgtacatgtgtgtgtgagcatgttcatgtgtgtgtgtgcacatgtatgtgtatgagcatgcttgtgtgtgtgtgagcaatgcacacagatgcacacgcatgtagaggttagaggacaaatcttgaggagtcagttcagtcttgccattttggatccagggatcacactcaggttgtcaggcctttgtgcaatcgtctctacaaactgagtcctcccactggcctgatgtttttggtttattgagacagaatctcagttagcccaggatggcaaaagcccatgattttgaactcctgatcctcttgcctccatctccaaagtgcttggattatggcatttggtatttaaatgagaaggaccccaataggctcatgggtttgagttcttagtcttcaactagtggaactgtttgggaaggattaggcctctctctctctctctctctctctctctctctctctctctctctctctcacacacacacacacacacacacatacacacacacatactcctaaggtgtgatcttgttggaggaggtgtgtctctagaggtgggctttgaggtttcaaaagtccacatctctctctctctccccacttcctccttcctttcctccctcctcccttcttctttcccccttcctaagatgtaaagttctcaactactgctccagtgccatgcctgtctgctttatgatatgataatactgggttactctcatgacagcaaataaaatagtatctaagacaaaaatatagcagtaggcctggctaaaaaagaaaataggaatacatagtttaaaaagaaaaaggaatacattctaaagtaagcacacttataaccctatcattcagccacacctggtccctatgctatacctctatctgactcagtaaggtggtccacaccagcggtcctgcagacatatgcatgctgtggagtgacctcacggtggccatatcactggtcatgaactgcactagaattactgcagttctaattttatggagccttactctgtaggtggcctgtggttgacaaaaacatcttgtacccatgactagttcaggacagtggcctgagcaaatgccaaagaaagtatgagatgtccatggttgctgggctttcatccgccatgcactggtgctcccaggctgcactggtggtgccccagggctgccctgtgaattctgatagtcgctcttcagctgcagagtgctgctgccaacattgcaacagagccacctgccagtagagactctctttggacagcatttctttctttctttctcccttttttttttattaagatttatttatttattacatgtaagtaacactgtagctgtcttcagacactccagaagagggagtcagatcttgttacagatggttgtgagccaccatgtggttgtgggatttgaactccggacctttggaagagcagtcgggtgctcttactcactgagccatctcaccagccccatctttctttctttttaaaaaagatttatttatctaatgtatgtgagcatcctgtcactgacacaccagaagagggcatcgaatccaattacagatggttgtgagccaccatgtggtatctgggaattgaactcatgacctctggaagagcagacagtgtttttaaccactgagccatctctcccgcccctttggtcaatctaagctcatatatgttcaaaatatagacatgagcttgatgcttgtgttaggttttttcgttacagctgctttgtccagtggaaataggagagtaaggatattgatacattaaacaggagggccattggacctgctaaactttacctcattcaggccaggcacacacctgtgcaggcacacacctgtgcaggcacacacctgtgcaggcacacacctgtgcaggcacacacctgggcaggcacacacctgggcaggcacacacctgtaacccagcattcaggaggcacagacacaagtatcaaggtcctcctcagttatatagtttgagaccagcctgggctacaggagaccctgaggtatgcttacagcttcagaggttaagtccatgatcatcgtagagagaatcgtggtgataggccagcacggtgctggagcagcagcagagagctgaacatcctcatctggagacagcaagcagggagccgaggggaggaggggaaggatggtttctccatcaaggccacacctccagcaagaccacacccacagaaggccacaccccctccagcaaggccacctctcctgatcctttccaagcagtcccactaactggggaccaaacattcaaacacttgagcctgtggagctgttctcattcaaacaccacagcactggaaacaaagtcgaaacctcagataatggaatactaaactgaggtgacacccacacccacacactgtggaaacaggactggaaactgcacagcacaggagaatacatatgaagctcagagaccaaagggaacaaaagaccaaggggcccaggggtaaccaactgactctttaaagtagggaagaaaggaagaaggctagcaagatggctcagtgggtagagatgcttgctgtactggttagttttgtgtcaacttgacacagctggagttatcacggagaaaggattttcagttgaggaaatgcctccatgcctccaactgtaaggcattttctcaattagtgatcaaaggggaaaggccccttgtgggtgggaccatctcggggctggtagtcttgggttctataagagagcaggctgagcaagccaggggaagcaagccagtaaagagcatccctccatggcctctgtatcagctcctgcttcctgacctgcttgagttccagtcctgacttccttggtgatgaacagcagtatggaattgtaaactgaataagccctttcctccccaacttgcttcttggtcatgacgtttgtgcaggaatagagaccctgactgagacagcctggtaacctgaagtcaacccccaggtcctacatgactgaagggaagaattcccacatgttgtcttcttctgtcttccacatgtgccatggcaagtacaaccccatgatagatagatagatagataggcaggcagacagacagacagacagacagataatgtaataaaagttttaaaggaggataagctgccaaatgtaaagtacatatagaacaggaagttgtagctctgggaccagagacaccttcagagataacaattgccccagtttcaagggaatctcctggatgttttatgcttcataatttttatgagtattgcatatattaatttgcatatgttcaacaatgtgtaaaatagttacagaacaatgaaatactaaaaggatgtcattgaagaatgtgtacaatgcttgctagaaacaaggccttttgggactcttgggagagggcttcaaagagtcctctcagcaccatctgaggtttgggcttctcaggctctggagttgtccctcaggctattgctgtgagcactgtgtgacatctgctccagaggctgcatttctcacaggtggggctctctggagcccaaacctgtccctccctcatgctggagccttgggtgctgattggaagggggagggccttccttactcactgtgggtcagagaagtctaggaagcctcctcaatctcacctagttacaaggtaacatgctatttttatcttattttattttattttattttattttattttattttattttatcttattgagacaaggtctgactttgaagccctgactgttctagaacttacagagactctattaagattattaagtgtgacttcttgtcctggtctgaggctaagatcttcccttcccttcccttcccttccnnnnnnnnnnnnnnnnnnnncctctccctccccctctccctccccctcttcctcctctctctctcttttggatttttcaagacagggtttctctgtgtagctcaggctggcctggaactcagagataccctgtctctgctttccaaatgcagggatatggctggggctaacggctcttttcttttctttttttcttttcttcgctggttcttttcttttcttttcttttcttttcttttcttttcttttcttttcttttcttttcttttcttttcttttcttttcttttctcttctcttctcatctcttctcttctcttctcttctttttttttatggcaaggtctcacaatgtagctctgactgatccaaacttgctatgtagaccaagttgacctcagccttgaactctcaaagatctgttcacctctgtctcccaaatgggaggcattaaaggcgagcaccacctcacctgtctcttcacagggttttctatcaagggagctcggttgctggatcatggcgtgagaggatgtactgtaggagacagttctgtggtctgggaggtttctggaggccagacagatgtggtgtaggctagaccgtgggaggactccacagtcactgtgttactgtgaaggccttggacttctccaagtcatcacaaagtcccattttccagttgccaaggcttactttgtgtttttcttccccagaggtggcaaatggcacagtgacaagcctgccaggggccaccgttaccctgatttgccccgggaaggaagcagcaggcaatgttaccattcactgggtgtactctggctcacaaaacagagaatggactaccacaggaaacacactggttctgagggacgtgcagctcagcgacactggggactatttatgctccctgaatgatcacctggtggggactgtgcccttgctggtggatggtgagttgtgctgtcagtgtccttggaagtggctccgagggtagcttcaatgtcctctgcattccagaaagatcctctggctgatcttttaactttgtcatttttggctcaaaagtttcaggaaaagggacaccgctcggcctgtgcgtgtggccagccagctgtggaagccatctggcagatttaatagccctggactcccagccaggcacctcagcttagcggctgctaaccccctcagattcttttggcaaaataaagtgaactttattactaagtttccatgttgcaaagtgttacaaagagaaagtaagtgctgaaaactgcccagcacccctgaaacacacatgagactctcagagggagcatctcaccaaggattggcagggtaagggctccctggctccagtggaagccctgctctcagccacgttcttccttatgtcccgtgtagtccttccagtgtccgtttgtccagtgttaacatcaggagaggccacaggtgctccttttgcatctttgtcttttcaaccctttagagcagtggttctcagccttcctaacgctgcggccctttaatacagttcctcatgttgtagtgacctccaaccataaaattattttcattattacttcataactgtaacttcgttactgttatgtaaatgtaatgtaaatgtttttttgggagagaaaggtttgccaaagggatctcgacccacaggttgagaaccactgctgtagtcagccctttctctctgtgcctgggactccttggccagtatgtccctagggagtcctgtcatttgtggctctgagctgaaccaggtagtcccctcagctgcgggtgggggtggaggtaatgatgcacagagcaggtctgcttggaggccttgcaccccctcatcctgctgagtctcttgcagttcccccagaggagcccaagctctcctgcttccggaagaacccccttgtcaacgccatctgtgagtggcgtccgagcagcaccccctctccaaccacgaaggctgtgctgtttgcaaagaaaatgtaagtgtcaggtggggctgtgcactgagtctagttgatgcttgctgatgtcctagagccaagggaagcagggtggaaccctccaggcagctgttggactgagtggacagggaccttttaatttttctagatttattttatgtgcatgaatgttttgcctgtagcatgtgtgtgcaccatatgcacgcctattgaatctcatggaactgaggttagaggtggttgtgagccaccatgggggtactagcagtcgattccaggaccctctgtaagagcaacaagtgcctttaactactgagacatctcttcagtcccaggaccgatgttttatcagtagaaagtttttccaagtctgtcatataacatgtgtaaggccatgctttgattctcagttatttcaaaaattaaaaaaaaaaagaaagaaagaaaaagaaaaaaatccttaggaataaaggaactgggccctagggtcaattcaacttacctttcccgacagctgtgggaaatgcacgctgaagttcagtgagactgattaactcgcttgaggtcatctagctaggaagtggttctaagtgttgggaagagaacccaagcccattttccatcaaagtccaaaggttttgggtgttgtcctacaggaaagggacaaatggctctgggggcttggaatgaggctgataggcttctatcggtaccttggccctgtgagcatgataaagacaggatacagagagtggtcatgggtgggggggtgaggtgcgacccatccagacttttgcctgttagaagatggcatggagacctggggccagggaggaagaagaagtataatgtagcacgctagagaaattgtagtctccacccacaagccacgcctctcacgcctagatattcccaataaagtttgagtggtcagagtgtggtattccttcttatggatccttcttattgggtcctggtagttactaccgatcaaacatggccccagaatattaagtggaaattcccagaagtaaacaaaagcatgatttaaattgggtcattctaagtaaccccacccaggttgtgaatcagctccagctacctgtgctgttccacagaactcctgatcatctgcttgccagtatttgtgttcatcaagcctggccctaggacaagatcagacagtgatcaagagcacaaaacatgagagccagaggttcacctgggagcctggcagtactgcagggcattgggaaggcatggtgtaccagggtaggccctgctaccatgaagtctcaggtctctcaccgaagggtcttggaaatacccctagcagatgagggagaatttccacattacaaaaccagtgtggcgaccagcgcggtctgagcctgaggttcttatctgagtctgaggttgctcgcttgttttctagtggcagggaaagtggaagtgggtgagatctcaggtttccgggtccactggggtggtttctgacttcccttggccatcttcagtctttgagttcttttctattttccccatccctcctgttcctctttatatgtgtgctttggtgatttgccagcatttctgctatatcacctgagggcaggtcttttgtgccctgggacagggaagggcttttcctattcatttctgtgtgtatcctttatagttcgaaggacaagacccaggaagggaataagaccagagggaccttctcctccgcctgtccctcattggctgggctctgccaaagatcctatcagacgggcactaatgcctttagctttactattttctagggagaaaataaacacttgggttgaaaagcgtgctgaaagtcacagacactaaataggagcagacactggctgagttgaagcctgaaagctagaatcagttctcaagcttccaattcctgacttctttctcttgaaaaagaaacaaaaaaaatgctagaacctttgtgcccttctctgttgtgtcccacagcaacaccaccaacgggaagagtgacttccaggtgccctgtcagtattctcagcagctgaaaagcttctcctgccaggtggagatcctggagggtgacaaagtataccacatagtgtcactgtgcgttgcaaacagtgtgggaagcaagtccagccacaacgaagcgtttcacagcttaaaaatgggtaagggagctcccgctgcagctacttccttcacttcctgatccatccctgggcaaggcagggaggatgtgcagaggggcttgggagctgggtcttctgggggcattgctgataaatagatgaggagagcgggggttcttcctgtgagtttttgcttagcaggtgcaaggctctgaggtctgtttacactaaataaataaaattttaccatttctggggagtggtacatgcctaacagtggggatgtctgcggagcctttgagggtctcctctgtgcttgctcctgcatagaagccctattccctctccacagtgcagccggatccacctgccaaccttgtggtatcagccatacctggaaggccgcgctggctcaaagtcagctggcagcaccctgagacctgggacccgagttactacttgctgcagttccagcttcgataccgacctgtatggtcaaaggagttcacggtgttgctggtaattcatttcctttgtttggagaaaatgtttcaccctgtcgtagcctctacctcatgacaatccatcttccttagcctcctaagttcccaagtgctgtaactaaatagtgagcccccatgcccagctgatctagatcgaagcaggaaaatgcccctaggactgaggggacgtggaaaagaagtaaagtaggttctggtccagctttggcccctccccccatccttcatagtctccggcgagccatttaacttgatgagtggtggctctgtctttataaaataagactaacaatgccaggccagactcctgattggcctaagaagaatgctgggttctgtcacctacagtgacttcagaatgcttgagaaggactccacctcagcccctggggtgggtgagcctctgccaagcggagagcggggtggtcaagagtgccctctccctgtagcattgcctcacagaggccactgagactcaccatgtctccatcctcagctcccggtggcccagtaccaatgcgtcatccatgatgccttgcgaggagtgaagcacgtggtccaggtccgtgggaaggaggagcttgaccttggccagtggagcgaatggtccccagaggtcacgggcactccttggataggtacctgggtctatgtggagggaggatgggacagctttcagcttgtgagtctatcagccgtcttgcactgcatggcaaagcaggctaaatcagtcagtgtgcgctcttcatttcagttcattgagaaagggcttcattcagtccgggcggccttggaacttactttgtagtcaacatgaccttgaacttctggttctcctgcctccatctcccaagtactgggtcattctgtgtgccacagtacctagctctatttgcccaggtctggtagctcctgtgtgtgtgtgtgtgtgtagggtcaaggtgctggctgcccatgtgtttgatggtggagctcactgggtttctccttacccactacacgtcttctgtccttctagtaggtgagcctcgggtgagggcagtagggagggggtaaggacagaaggatgggaggagctccaaaggatgataggcatggttaattgactaaggctatttatcttcggaaatcaaccaataataatgctgtgagggacataatgaaatctcccaaagcatgagcatggtcacctttcactgctatgaccctgtctcgaaaaacaaaaaggatgaagcccacaacatgtgagtgttgagtgtattttaatccaaacctaaacgacatnnnnnnnnnnnnnnnnnnnnnnnnnnnnnnnnnnnnnnnnnnnnnnnnnnnnnnnnnnnnnnnnnnntatacagtatggacacacacacacacacacacacacacacacacacacacacacacacacacacacacatggtttttgttagagtcctagccccaactgtttcctttgctgcactatggaactcaaagttttatatatgataaagtattctaccactgatctatatccttggcctggtccagaaacagcttcttcaaaagtttcttttgtctaagtgtggtggtggcaaaggcactctgtgagttcaaggacagcctgatctacatagttagatcctttttcaaaacaaacaactacaacaaaaacccaaagttggtttgtttgttttttattgtggtacagtgtgcatggcgtaaaatttacttttaaaactcttttgcaggaggtttttgagaagggcctcattatgttttctgcccttgaactctggtttttacatggccttctttttttttttttaaagatttatttattatatgtaagttacactgtagctatcttcagacactccaggagatagtgtcagatcttgttaccgatggttgtgagccaccatgtggttgctgggatttgaactcaggacctttggaagagcagtcggtgctcttaaccactgagccatctctccagccccctttacatggccttctgattataggtgtgagccaccatgccttgttattataactgtttttgtttgttttgtgtttggaggccagaggtcaacctgccgtgctgtttcttgtatactctacccatcaggttttgctataagcattcccagtggcctggtgcttgctgagtgggctgggttggcggggcagagagcttctgggatgctcctggcccacctccctaactgtctgccccagtgctgagatcacacagccagcctccctcccatgcctgttctgttttttctaacatgagttctgaggcattgcacgtacacggccagccctgttttaatcgttgttcagtgcgttcgtcgtgcagcccatcactgtccaccatccatctccacatcatttgcatcttgcagaactggaatccctccaccttgaacagttacctcccatccccgtcccttccctagcttctgggacgtccatcctactttctgtttctgagtttgaccaccttaaacacttcgagtaagtgggttgtacggaaaccttttgtgtctgacttatctcacttagcacagtgccttcaaggtcaattcaaactgtggtgtgagctagaatttccttcctgttggaggctggggagtgtcccattgtacacaaacatcatgctgcatttccccaaatttgactgtggagcttgggctgcctctgccttttagtgtgtggctgataagagatagggtgttactgtttctggcctagaatgcacagtgtagaccaggctggtctcaaactcatggagatccacttgcttctgttccccaagtgctgggattataaaggttccacttttccttcaacttatcaaaactggcattctgtctgtctgtctgtctgtctgtctgtttctccttcccacttcccacgtgtgtgtgtgcacgtgcttgcatcaggagttggaagccatgcacataatacagttattttatacttcaagaaaacctttataactctctgtcatagtccctcagaggggacctcgggcaggaggaggcacttggtctagaagcccactgcctcagtttccctgctttaggaaacaaattgacatgggaaagtgggggagggaagtccacgcccacacccccctggtagctgtggccttcttgccttgctcctcgtttctttggaggtcagcttcagctctgactccttttacaagtgaacaggttggggtgtctgacgacatctcctctcctgctggggcttcggcaggaggtcacagtaactatcaggactggggatgctccagcaagcagagtcctcacagtctggactctgccagctacagatgatttgattctctccatagaaccctcatggggcttttgcgggttcaagggttctgggttgcagtctctgctcagtccagctctctccttagtgcacctcctccactctcctccccctgttccttttctgcactcttctcaaatcttccattccctgtgccttcacctgcagctggcacacagtgcttatttggtgtcgaatggacggtcatgggtccgatagctggctctgtcccttgttactatgactttggggaagtacctatctcagccccagtttggttatttgtcacttaggagtactaacacctgcctaaaaaaaaaaaacaaaaacccaaactcagcacctgcctcccggagccttgggcttcagtgacttggaaagtggcatttatagagcaggctgtgagctggctgtcacccaggactctactcctcctgcttccaacctccctagtgctaggattataggagtgtcccccagcccggtgccaccctgcccaatttatacagtgctgaggaccaaactgagctacacccttagatccaaagccggtattttaaagcttttaaaactgttcactgttggagccagacaaacttggtttacgccactttgggagctaaggggatgctttcctggggagagacagaagactgtcagggcttgctgtctgccagcctcggtccaggttcagggagagggaagtagacagtgatggagcagggcacttggtgttttctggcacgggacacatttgcgtgggcacacacataagtatgcacacactcacacacatacacatgggggaaataaacatgcaaagttatagctttgccactttctattaactttgagaaagttattttcctttttcttgcctcagtttcccccatctttacatgttttaaagatgtacttgttttcagtatgtggtgtgcatgtgagtgaggtgtgggggtcagaggagaccttccagacaaggattctctccttccccagaagctggggggggggggggagaccttccagacaaggattctctccttccccagaagctgggggggggggggtttctgaacttgtgtgaggcatcttgctggcaccccccatattgatttatttaagttttatttgatgtgtatgggtgttttgcctgcgtgtatgtcagtatgccacatgtgtgcctggtacccatggaggtagaaaatgcactgggtcccctggaactggagttacagaggatttggggctgctgcgaactaaacctaggttccatccaagggcggcgagtgctcttatctgctgagccatctctccagccccactccccatcttctttaaagtgaagattccagtcaaacacttgactggaatggttcacatctgtaatcaagcacttgagaggctacaacaggaggattgctgtgagttccagattggcctccacttcagaatgagaccctgcctcaaagatcaaaacagcaatgacaaaaacactgggcattgtgtcctgtgctggtaatcccagcacctgggtgacaaaggtgggagagttaacctaaattcggggtcagcctgaattatatagtgagttccagggcagttgagagactaaaattatgtgagactaaaattatgtgagactttgtttcaaaaccaaacaacatcaaccaaaaacaaaacaaaacaaaacaaaacaaaacaaaacaaataccctttcaccacacagaacctgtggggagcctggcatggtgttttacacttgtaatcccggtatttaagaaaattgaatttactgggtagtggtggcacacacctttaattccagcactcaggagacagagtcagatggattctgtgatttcaaggccagcctggtctatagaggacatccagggtacacagagaaaccctttctcaccccctttcccaacaaataaaaaattaaaaaaaaaattgaattcaagatcaaaggtcaggctggtctacatagtaagttccaagccatctaggctatagagaggccttgtcttccaaagccagtccatccattcacacatgtacacagtcctagtgggactcaatgaggcttgctgccagggttctgagacctgtagggcaataaaaaggtttttaaggacttgaaaaaggttccatgtgatgttgaacttgtctgggtctggggaacctctgggccgaatggccatcagttcttggacctatttttctctttactgctgcagtcatttcctggttttagctttgaatctagcagcagccaaccacatgctctgttgtcctgtgtacacccttctgtacacacccttctgtgtacacccttctgtacacacccttctgtgtacaaccttctgtacacacccttctgtgggttgaactcagctcattatgctaagttgggaggagcacaaaggtaggaggtgctgggtcctagccacaattagaagttcaagtctgagttaatttgctttgtgaacttagacaaattacttcccctctctgggccttctttcaacatctccagggttgctgtgtgcttgtctctccttctggaggtggtggagcccattggaaattctctcccaatcagtaacaggtcaccctgtcctctgccccttagtgatatgttattctccagagttggggacactgaaagtcttatacttggtggtatttttaacttcttagtggaaaaaacgctgagatgacgagagattctgagtcattccatcccttgcctggcaaggttcagagctggtccctcaggccccattctgggcctgccctcaagtttgatttctgtggaaggcagttcccatgaagggagtggctgtccccgactcctttttatcagggtgtctggctgatcccaggcacgagtcacttcatatattttattgcaaaaaggcaaactcaaggaattactgttcagagtgcccctatcttgcaatgtgtatcaccctggcctttccctttctgtgtgtatatatatatatatattgcaatatataacatatgataatataaacgagttttagaaactttggatcaaacatgtcttttttaaaatatgttatagtatatcttcaaagtttttccttttttttttttttttttttttgagacagggtttctctgtgtagccctggttgtcctagaactcattttgtagaccaggctggcctcgaactcagaaatccgcctgcctctgcctccagagtgctgggattaaaggcatgtgccaccatgcccggctccaaagtttttctaaagtccatattttgaagtatttatttattattttaaaaagatttatctcatcttttttcattgatttttttttttcatttttattgtatgtctctgggtgtcctgcttacacctatggccgtgtgccatgtccatgcagtgcctgcagaggctggtcggatggactgaggaggcatgggagttgcagagggttgggagccaccatgtggttgctgagaatcaaacctgggtcttctggaaaagcagccagtgttcgtaaccacttaaaacttgaagttttacttttttggtttttgttttgtttccaagacaccatctccttgtgtagctctggctggcttgggatgctctaggaagaccaggctgacttctatttcccaagttctgggcttaaaggtgcgctccctgaacttgtatttttagtagatacagaataatcaggcatagttgtgggaacatgtaatgttttgatacacatcatgcaatgtgaaacagttttgttttgttttttttccaggccactgtgtaatatggctttatcataatcgacatagctagtcccctaatgttggagagttctgggttcttagcattctgcttaaaaaatatattatggattttattgaaaaaagaattttttttttgagacaggatctcctctgtaccagccttaaactggaggcactcctccttctgggcttcctgagtgttagttagtgttacaggtggcaccattccctgcgcactgtgatgctctgggttgctctgactgggttccagggtccatgagtcactaacccttccttctaccagcagagcccaggaccaccccggcaggaatcctctggaaccccacacaggtgagcttgcccccagaaagggccagggcatgcactgccccaagtctggtttcagtgccagctgggtcttccagagatgtggccgtcaagtgccatctgcctggccctggtggctactgtttcatcccgaggtctttggataccactgacagcttagtctgagaccagattcaatttatcttagccctcccctgtggcagcctggtatcatgaagcattgggaagtggattatggctgaagctgcttaacaaattcctttactaatccaatttcccacctctctcctgagtggtccttaattccctcaacaagaagttcgagtctttgttctctgctcccaaaacacaaagaaggaagcaggggtctgggcctcacacacagggctgccagggctgtcctagaagggatgtcctcagggggctgtccttgtggggctatctggtgtcttcataggcaaaggcagatgagtccttgcctctctctcaggcggagttccaggtaggtcctaggggaactgacacgagctgagactggccacccattccactgtgtgggtgaaatctctcagatctagaagcagacggtaagtccacctggactcagaaatctgcccacaccacagctggctagggcgaagtgcaggtggggtgctaggaccggctcttcctgggaggctaccaccgtgcctggcaacagacctcatggacagtggctgtgtttaccgagcacatcctgtgtgtctttggcagagacatgggtggaaagaactccacctggcacaggggaagtgagcacacaaataacaccagtgacaggtggtcgatgaaggtcgggcacagagaggttcattcaggacacagaaaggaggtggtggctttgtggaagatgtgtagaagtccctatgaaggctgatggtgagggtcatctctcctaggtctctgttgaagactctgccaaccacgaggatcagtacgaaagttctacagaagcaacgagtgtcctcggtaagcgctagtgtcttgctattcctctggcctgcagaaaagctctcacttggacacttagcagctgatcagaggcaacgatcttccgttgttttatataagtctttgcagtactggggactaaacctaggtcttcatgctaggtgaacctgccacgggtgagctacagcaccagcttgcctgtcattactccatatgctcacttgccgttgtttgctacgatacggtgaggcccgtgcgaagagtggcacagatcaggaggcttatgtggtcagtccacagtatggctgagtagactatgagcgtcattgctggagaccgaaacagagcatccgtggaaggaaacctgtttgcatagctgcactggctcagccaagagcgagtggcctctctttagggactaggcaagaaaggggcttaggaaaggtagacagaacactctggccaggaagggagatctgtggggagtcctgcaggaggagggacatggcatgtctgtggcttgactgccaagttgggaataggccagagatgacatcccagtggagaaattgcttccaaatacttattgaaagctcccgagtctccctgactcggtcccagtgaccaccacagagtcctaggatcctccatctctcatgtgccttctgcctggagcctgggtaaaggataccgggaaagctactctgagcgtgaacggccctttggttggctgcagtgggcatcagccccatatgagctctcgaatggtgcagtctccctcagtcactgtgggaggagtcggtgcagtgcctcttcagagttctgctgccatcccgagctgctcagtttctagtaactgctgcctgactttcttttccctctttccttccttttgtcctgtccccttcccccgtcccttccttttttctatcattcccttcccctgcccacagccccagtgcaagaatcctcgtccatgtccctgcccacattcctggtagctggaggaagcttggcgtttgggttgcttctctgtgtcttcatcatcctgaggtgagacgggtcctgtactgtattgtactgtactgcactggctctgggctgtactcttgcgtcttagctttcatcagaacctaaggaactttgctcattcatttcttcattcaacaaatgaacatgtaacatgctgagtcctgggtcaggtgctgcgggaggccaggggacaggatgggtactgtgtagtgaggaagccaggccctgacaaggaagtgctgacatgggcagagctacagtagcacagccatggggaggaggaggaggaggaggagaggagagggnnnnnnnnnnnnnnnnnnnnnnnnnnnnnnnnnnnnnnnnnnnnnnnnnnnnnnnnnnnnnnnnnnnnnnnnnnnnnnnnnnnnnnnnnnnnnnnnnnnnnnnnnnnnnnnnnnnnnnnnnnnnnnnnnnnnnnnnnnnnnnnnnnnnnnnnnnggcagagacttctagctcctgaggccctcacatcagccctgagctggcctgacaagaaacactgagaaccgcatcaggctgtgctcagctcagggctgttcttgttctgatcctcattttcagtgctggagttcgaacccagggctaggcaggagctctggctttgagctatgtccctggcaccaaattatgattttcctgtgaaggaatgaaggaggaaacgaaagctgaaagaggcagtgtgggtacacccagtaaggagcacagggcacaaagcctgcttattggatggggccttaaggctcatgcagtcaaattctttaaccaaccaataaggaagcggccccaagggttgtccaaggagccagggctgcatgacactagcctatggaccacgtctacataggctgaggtaacccagttggccccacgaagcacttatatgtgctaatagagaagcatagagaccagtttgcttgcctgtttcttaggctcagacactggctgctggcagcccctgtagccccggagccactggctggggacggacgtgccggtgctaagaacacactagcaattcatttcctacctgctgagtttctactttgttccatataaggcagatttattagtaaaagaggccagtttgtttgttttagtttagtttttttttcttttctttttttctttttttttgagagagagcgaagcccaggctggtctcaaactctttatccccctgtctccacttcccaagtgttgggattataggcaggtgacacttgcctaataaaactagtaatttcaagtcaggtctggtggcacatgcctttgatcccagtgctcagaaagcagagacaggcagatctctgagttcaaggccagtctggtttacaaagtgagttccaggacatccagggctacacagagaaaccctgtctcgaaaaaccaacccctcctcccctccaacaaaataaaacaaaacaacctagtaatttcaaataatgaaaacatcctctatcttttaagactccttagcaagaaaagactctcacttagagtcagggagttaaaagccggctgagccacagcgactgggttgcacgtgtgggaggcgtttgacgttttgccagtcaggatagcatagttttagaacatttagtttatatcccgagctaaatagttttctaaatatttctctagcaacgttagagaaaatgaaaacaactaaaatatactaccatcaaaagtttgcccttccttagcaggaggtcacaactgcagggatcagttctcccaggactgagaaaacgggcttctgctaacagttatttttctgctcattttcctggaatggacttaaaccattagctgtacacctacagcttaaaacccatccataaaaaccaagcgtagtggcacatgacaacagtcctagccctgggaaggctgaggcaggaggatctctgtggattccagttgagggtgatctgcatagtgagttttagggggacacctaatgaggggccacctgacccaaacaaacagaggaaaataacccaacaaaccaaacacaaacaacgtcattttggactagttacaaagtcccattccgatatttcttaaattgctgctgggtgggatagaatcccagcctagaatcccaggccacggcagcagggacactgtggttaaggccggcgggagctacagagtgagacccagtcccccaaataagttagttaatggttttgtgttgggctgtattggtagccatccaggggagcatgctgtccacagactgcagattaggcgcatctatcggccacgtccaggcctctggtcctgctcgtctgtgcccatgctaggtataagcatcttcaactggtttagtgatctcagaaagaatgtttcaaaaggaaagcacggttctctagtttatcctttgtctcacttactgttctctcactgcgagaaaacacccatgatcggaacaacttatgaaaggaagaatttaactgagggcttgcttccagtttcagaagtttagtctatgatgttgggaagcctgggcagccggtaggtatggtgctagagctggagctagaggtggagctgagagctcccatctgatctgcagagagatgggggtggggtggaggggctgaatatagtgagggtttttgaacccttctacacctcctccagcaaggccacaccttctaatcttactgtacggttgcactaactggggagcaagcattcaaacacatgatccagtgggggccatcctcattcaaaccaccacagtccttccagttacagagatggtttccatagtgtgtttatgagatcagtaacagttgtgctttattacaggcagtttgctaagtgtctagagcttaatgaatgttaggcaagtgctctaccactgagctctctctccagcccctctgcactcgcgcgcgtgcgtgcgtgcgtgcgtgcgtgcgtgtgtgtgtgtgtgtgtgtgtgtgtgtgtgtgtgtgtgtgtgtgtctttacgattacttgccacaattgttctgtatatataactctaaattctgggctggaaagatggctcagcagttaagaacacttactctctttgcgtaggctctgagctggttctcagcacctacactgggtggcttacaccacctgtaactctagcaccggggatccaataccttgttctagcgtgtatttacaagcacatacccacacacaggcacacatacctatgattaaaaataataacaataataaaaaccctcaaatcctaccttttaaaaatattttcactttgtaaatattttcacattctttataaacttcacatttattagcaataggcttctcttataagtacagattcccaggttaactgttatcaggcactggaagatgttttgtttttacaaaacagcactgtgctggacatctttgtgtctaaagttcttccatgtttatatcattgtcttagtcactattctattgccatgaagacaccatgaccaccacctttaattggaggcggggagcatggcagcagacatggcaggcatggagaagaggctgagagctacattctcatccttaggcagagacagagagaaacagtgggactggcatgggcttttaaaacctcaagtcccaccccctcagtgacacacttcctccaacaaggccacacctctaaatccttctaatcctttcaaatagaaccattccctggtgactaagcattcaaatctatgagtctatgggggccattcttattcagaccaccacagtcatttctagggtctgttcccagaacatgagttcctgggtctgaatgcttttcagtccacggtgtagcagcctgccctcaatcctcttacagggagaattccactcagtgactgagcgcactccccttcgcaataactgggctgtcttcctgcagccaaataacattccgcagattgtttacgttgcttggataacaggccaagagccaacggcagatccagagccagctatcaatcatttatcataacaagaacaaggaatagtctgctggtttcaagccccaaaaatgcccaactcttgtttatgacattggctttccctcccccaccctagcacttccttaggtaatggcagctgatgggattagggggggagggtcaccttattctcactttggaatcagtacatagcaagtcagccatagagaaggaagtcaaagggaagagaggaggccctggttcagcacaccttgccaagggccccttgggaaggagcccccgtcatacctttgcagatctgtatctgtggctcagctttcttccagctgtcaggtgactctctcatggttattgagcctggccccgggcccagacatcgcacggaggaggctgtgatgagggcgatgcctatctcttccggcttaccactgactttcctgtcagatgagtcaacacgtgcccagtggtgcccctgtcagagggtgcagtctctccctgctggggtggggtgggtggaggtgtctggagactgaggtactgaatatagagggctggatagagtgctactagggaccacacagcctgttctctgctctccattgcaggctgtgagagtgatctgctcctgacagcctttgttggacggagttccatattccttccccactgaaagaatactctcctctttttaaaaaatatttacttatttaatgtatatgagtatgctgtagctgtcttcagacacaccagaagaggacatcagatcccattacaaatggttgggagccaccatgtggatgctgggaattgatgctgggaattgaactcaggacctctagaagagcagtcagtgttcttaacagctgagccatctctgccacctacctcctttttcttttttcttttttttttggtttttcgagacagggtttctctgtgtagccctggctgtcctggaactcactctgtagaccaggctggccttgaactcagaaatccgcctgcctctgcttcccaaatgctgggactaaaggcgtgcaccaccacgcccagcttttttttttttttttttaaacgtgaatggatagagacctgataatgtgagcccaacagacagcctctggccctgggcagattgaggatgtgtcaggtgacttttgaagtgcataaaggaacacttcagatttctctccctttgtaagttagatatggtcttgaggtagttttgaaactcaccagctcttcagggtgttgtgggacctctggggatgatgtgggagccagatagtcggcatttctgtaagccaaacctagacacacctaaccaactgaggcaggcggctgctgctgctgctgcagatagggtttctcaccatgcctttggcctgggaggagtctaaggcctgtttgtttgtttctctgtgtttgtataaagactcaagcagaaatggaagtcagaggctgagaaggaaagcaagacgacctctcctccacccccaccgtattccttgggcccactgaagccgaccttccttctggttcctctcctcaccccacacagctctgggtctgacaataccgtaaaccacagctgcctgggtgtcagggacgcacagagcccttatgacaacagcaacagagactacttattccccagataatcatctggatggtacctggcagctggcagggcaccacgagatcagcacacaagtttctcatgcgggtcccatccacctggggtggggtggggcgggcggggctgcagcttcactaacccacaagagctctgcacaggttctgagtaggtgcagctggtgctgcataggctctgaaggaaggaaggggctgtgaggaacacaggccattgtgaagacagcttgtgatgactgaatagagatgcccgtcagctccacatctgatagtggctcacaagctgcaccctcaggaggcctcagaaaggggctccaaaggctgccccagctgcctcgctctgcctcactgccccaagccaccttttagctctcgaactcctaaagtccaagcactttgccattctctttccgaggccactgaggccgggtggaagcttggttccgatttccttctcaacatctggaaagcagctgggcccggtggtggtgactaatatctcagggcctgatggtttacgcgagtgacaatttctcacaagcagtttttaaatgtgaatgatgaccccaggcactgctggctgcggaggcttcattttcctcttcgatctcaggacttcaggcgaaaagcggagtggaagtagagagcggatgggtgtccaccgtcctcatggtacttgcgggaggtacagcctggaaaacacgtttcctgtccccctactctcccaggagagggatgatggtagggggtgcctcttccagggcggagagaactactttaccccagccttgcccattctgatttcaactggactggagctactaggaaagtcgacattcatgcaaaaagaaaaaacgttaactagcaagaatgcactttcattttggtttttagagaactgttgcctgtttctctcaagagtctggaagaggccgctcactgcacactactgtatgaaccctcactgcccaccctggaggaccaagtgcagtaacggtagcccaaacaccaagtcaagtgaaaatcgagggaaaaaaaaaacaaacaagcaacaaaaaaaaaaaaccaaaactaaactaaaaaacaaatcacccccccaaaaaaaaacaaaaccaaaaaccaaaaaaaacaaaaaaacaaaacaacaacaacaaaaaaaacccaaaccaacccgctgtttcctataacagaaaagcctttggtttcattttttattttgatttttttgtcttaaaaagtataaaaatagcctgtccatgctctgcttcagggaatgagcctgtgaacactcccaggcgcaggcaggaagggtgtctgcttcctgctacacctcactgccaccttggccttccttgctttacgtttgactgagtggcctcagatgctttcccctggggctttgaggaatccagtgatgttagtggtcaccgaggagaccacagagccacagtgtggtgcttagattaaagtgacttctgcaaccacagcaccccacacctgccgtcttactgaactatgccagtaacttgccttttctgccaccaccacgagacgagacgggcagagctcggaagctgtcaccccatgccctctgcttgtccgctctaggggccactgacctaagcattagttattttattttattttatttttttgtgggttttgtacattttaggtcctgttgctgtcttagaaaaggctctgtaggttgacagaaaatcaggccaagtattcatgttttgttttttttttttttccttctttcctcctttgctaagtttttgggactcaagggtagcaaaactgctgtgaaagggaaatttattaaaaatgttacagatcgtgatcttcaggggatcggcgactgtgctcactcacagttcttcagtccctcacagggctctgctgttacccaagccaggcagagcaggcagacggaagactgaaatccagatagctcattatctctgtgagttaaatggctttgatctccaagttgttttcactattgttgtaaggggatagcctccccccaacccgtatcaaaaggatgctttttccttttgactttttataagctaagtcaacaaagtctgtttcgtccggtttcgttcacttcacacaggtgtatgccctcagctgcttctggtctcaattctgtgcaagctgaataggtgttccatcctcgggtcattcttactggagtttctgcagcccacaggctgccttgtcaacagtaccacttaacaccagcattcagcgaccaggcagccaaatgcctggtctagacagagatgatttaaacatgatctttgttgcatggtagaaagagggaacacatactggttctagttctaaggttcttagatgtttggtccttctggcattagtgaaatagctttaaactatttcaagggagaagccttggccacacccacgacatttggccgacagtcctttctctccatgagccttgccttcccacctggctgaaagctcacactgaatctttcctgtgtccttggtgtcttgggagaaagggaaccccggtgtgggctttactgccggcattggcttggagccagcgtggagcagagcccaacagggtgggccaggcttagttatggtgtgccggtttaaggaatgcctggtttgcctggttgcnnnnnnnnnnnnnnnnnnnnnnnnnnnnnnnnnnnnnnnnnnnnnnnnnnnnnnnnnnnnnnnnnnnnnnnnnnnnnnnnnnnnnnnnnnnnnnnnnnnnnnnnnnnnnnnnnnnnnnnnnnnnnnnnnnnnnnnnnnnnnnnnnnnnnnnnnnnnnnnnnnnnnnnnnnnnnnnnnnnnnnnnnnnnnnnnnnnnnnnnnnnnnnnnnnnnnnnnnnnnnnnnnnnnnnnnnnnnnnnnnnnnnnnnnnnnnnnnnnnnnnnnnnnnnnnnnnnnnnnnnnnnnnnnnnnnnnnnnnnnnnnnnnnnnnnnnnnnnnnnnnnnnnnnnnnnnnnnnnnnnnnnnnnnnnnnnnnnnnnnnnnnnnnnnnnnnnnnnnnnnnnnnnnnnnnnagggtctgccaaagtgggagggggcaggccagctggggagggtctgccaaaatgggagggggcaggccagctggggagggtctgccaaagtgggagggacaggcgctggggagggtctgccaaagtgggagggggcaggccagctggggagggtctgccaaagtgggagggggcaggccagctggggagggtcctggggctggcgctggggagggtctgccaaaggtctctccagcctctgctgctagtgtagttgggtgccagttccaggaagtttctatggcaaccttaatgcgccttaaggaacactgtcaggtttgtgaacatatgctcagatggagatcttgtttccagggaaaggactggtacagtgtgtagcaagctggaatggacagagagactttggcaagagatcatatccgttaaaaacaggatacctcaatgctacatgtttttatctttgagacaatatttttaaggtttttacgctctgtcccctgtgagctgatacctaagacctaagtcagtgcttttttaatgcctttttgccctcttgtttgctttaaagtgaaatttgtaactgtttggaataaataatttctaaagttgcacgtgagatgttcttctgctttgggaacctggtcattaaaaggaaaaccttccttccatgatgagcgaggagtaaagaatgaggaaggctaactaactaattaaataggactgtctctgagggcacagcggctcagtcctctaacccggctcgacactaggaaggcagaggcgggaggatttctccaagtttgaggctagtgaggccttgtatgtcacttatactgccctcacagacagacagacaggcagacacacacacacacacacacacacacacacacacacacactaaacctgggactagcaatttctcaaaaggttttagttagtaaacattctccccaaaccaaggcctgggatttctggaaggaaatcagaggctcatgtgtctgtcacgtttgcattgttcagcattaccagatagaggcatgttagaaaagtgaaggaaggcccactacttaggtgtgtactggactatggaggtgagaatgggatcctgagagccatcccgagctttcttggtcatcagatggctgagtctgtcctccactgaaaaagatcttgggcaagaaaaacttgggacccagccttctctatgtcccaaacagaaggaaacccatcatgtggatgctttgcaggtaagagtaggggtggctgctgagggccagcctcagcttggtttgggttctgagagaaggggtgtctgggagcagtacaaacaaataacttgaagtctaatcgtgggtccaagctggctctgtggttgagacagctaattttctgctagctgagagagaccattctctctgctagtaaacatacttcctacaagctctctggatagctcgtgggttttctgaccaaagtcagaaaagctgctatatatatataaaaaaaaacctcttggatattctaaccaaatcagaaaccctgtttgaaaatttctaaaattaattcttggattttccaatcaaaatcagaaagaaaaaaaaaaatctcaaagagccgtgcgcgctcttcagacaaccttctctgaatagcttctggaaaacattgtaaaagagcgacgtcggctctctaagtaactcttagtggtcagaaatcccattagaaaaaaattctaaaaagctgagtttgctctccatgactttccagactaaaatcaggaatcctgttagaaaaaaaaaacctagaagagctatgttccctctccagagatcttcagacagctcagctctccttggtagagaaaaattctaagaaccattattgctttttgccagctcatctcatgcagcccaaaagcctagctttttatttacatatcaattcagtcatttattccaggttccctcttgaccaccccggggaatccacactccaggaccttagccccttgactcacaggaaagggatagcaagtccatttttccccctcttttattaacattgcagaagaattcagagatctgcctgcctctgtaaacatagctgggtgggaccttgtcctgagagtaccatctcccaccactcttggacctaaatttgctctgacccaggctgaccttgaactcaagaatctgcctgcatttgtatctgcctgtctttgcgtctctctggcaagccggctcacagtgcagccgcctctgctccttcacatctgtgaagctccttatacaattcatactgcattttatatttttgcatagctgagaaattatacatttctgaacatgtctttagagttcttgtcctgaagatcccagtgtttagcattttgctgagacattagtcacaccttcctatcctggactcacggtgtctctgattatcatgaaatcattaacgttaacagggaggacattccttggaggaacatgaaaatatgttcattattatacaaacaagccttactcccacagcagccgtcaactctcgtggaggcccacgcctgctggccctgttccaggggcaggaaccatgtcgttttgtctctatcaaggccatgccacagctggtggcaagaagtgtgcaaaggcccccaactcagatgaagctggggttgggtggcacccactgcccttcacttggacccctgttcccgaagcacagctgttcttctccaccccaaggcaggtgctgtttccttagtatgagctctggtcccatagctgttggtgaccttgatgcccctttctgcagccgtgtgctctccaaccctgaaccactctctccagcaaggatccctgtgtcctcatttggtttgctaaactgaggctggcagccggccaactgggagtctgatcccccgggcaaaggcatagcactttcaggggtgactttgaagaggtctgagcaccaggggaggtcacagagaggaaggacagaaatcggttccttaaatttttctcccctttggtttttctgagatacggtttctctgtgtggccctggctatcctagaacctgctctgtagatcacagctggccttgaactcagagatctgtctgcctctgcctccagagtgctgggactaaaggtgtgcgccaccacagctccggctagatccttaaactgaaccaggggcttccctttcacctctggacttgccgtgagactttgatgcttagtttgtatacactttaatggacctttgaaaacgcctcccattctgtccgggatcgcagggctctgtcacatggagtacaggagggcaaacaaccttaagagcccaacctgagagtctgagttggatcttacagaggcagcagaagacaaagttttgattctggaagtttctaactatttcccttaagttccattcccagctctgctggcctctttggggggacctgcacacatgtgacaggcacagacaaataaaataaaataaaataaaataaaataaaataaaataaataaaataacatgtgttaaaatcttggactggaaagatggctcagtggttaagagcactggctgctcttacagaaggttaaagtcaatggaaaacccagaaatctcggaaatgttcatgcggagcgcttggaataaaatcacagccatttctgagaaatatctctgttacttaaagtaccttactgagaaggtcttacttaaggggaagagtctccaccactggcttcctgtgggtgtgtctcacgggggatttgttcctttagatctccagagatgaaaggagaccgagggccccttaggagacttttgttttatttttttcttgacagagtcttgctatgtagcccaggctggcctgcagttcacagttcttgcctctcagcctgacccttgtgggagttacacccagccagttttaagaaaaacaagttcttggttttatgggctggccttctcaactctagcccacttgtgttctcaggactcccctattccccttgaaataaacgatcactatttccatttctagccaagtgtccttgatgcaatcttctggcctaggacaacagcctggacccagatgccctctgaactctgacttgaagcctgaagttaatcatggttctttattttctcatctcttttttggattctagttaaagcctaaatatagttctgagacactttgggttttcttactggttcttgaccgtcaagccaaactcaaagggcaggacttcctccttctggcagctgacgggatctctactttcctgcttgtttttgttgagtcagagccctggctgtcctggatctcactatgtagaccaggcggctgttcatgaattcagggagatccacctgtctctgcttcccaactgctggattaaaggtgtatgctaccacagccagccttgctccactgtctgtctgtctctttccttctttcttccattttttttttaagatctattgatgtatgttatgtatatgggtgctttgactgcagatgtgtctgtacatcagaagtgggcatcagatcacattgaagatggttgtgagctgcctcaggctgctggtagtgaaagtataacatcgtaaaaacagaattctaggcctttaggcccaggcttgggaatgtggcctttgtaaaggtaatcataaaagaaatagcgacattcctccatccacccgcttcctgggttcaaagagtgctcattcaaagaaagtcacccagaacctgcaatgcaaatgtgctattgttgggggctcttaaaaactgtcttgagagttaacaattaccaggtattccttgtgactcttgtaactttacacttccttgtgactcttaactggtatctttggtatcttccatcaacgccctccccacttccttaagttgtggtttcttcctttaaatacccccttacccagctactcggggcgccacggtcctctacccctgcgtggtgtatgaccatgggcccgagagcgctcttgaataaaaaatcctcttgcaatttgcagcaagacccgtttcttgtgggtgattttggggtgtcacctctcctgagtcagaacatgggggagtcctcacgttgtgggtctttcaggagaacctctggaagggcagccagtgctcttaactactgagccatctctccagtccctgctttactgtgtctcaaccaaactacaatacgaggttttctggagcttccaaaacaacaacaaaaaccaaagcaagatccctaaactaagttctttctttctttctttctttctttctttctttctttctttctttctttctttctttctttctttctttcttccttccttccttccttccttcccttcctctctctctttctcttttctttctctcctcctcttttcttttctttcttttcctccccctcctccttctcgttgagttttctctgaagctgagagtgaccttgagtccctgatttcctgctcttcctctcttccaaggacgataatgtcctgggagttgggtggggcactatctcagccaggctgtttgcggcagcagtgcagggaccggtggctgctgtgcagctcttcttggggacagctgcctcggacctgagttacaaccagcaaaatggcctaagaacaacatctgtgaaatcaaagcggacctgggctttctctttccctttatgtgtattacgtagcaacattttccgtgagcattgtttctataatgaaaggaaacttttcattaagaagctataatctcatctctctttttgtctttgtttcattttttggtttcctgaggtggatctcctattatgtagacccagctctgtagaccaggctggccttgaactcacagagatccacttgcctctgcctcccaagtgcagggattagaggtgagcgcactgtgccctgcctccctctgtgtttttagtaggttaaactgtctcagagcagttgtctatgaaggccaggcacaacacaggcctgtggttccagctccttggaaggcaaaaagattatttgagcccaggagttcaaggctaatttgggcaccgtagccggactgagtctttaacagccaattgggcatcacacacactaaaattgaaacagcacagagaaaacaagtgtgggccctgcccaaggatgcaaatgtaaacccatctttattttaaaaaactgaccaaccaaagaaacccagcaagggaacaaagcgattagagtcaaagtctcccaaagacatttgtcctggaggggatggtaggtatgaggtgactcacggtaccctctactaaagcttgatactctgtttttaaaagacaagggttgtagaagcgatgttttaggtggaaactcagtttaaaataatccaaaatgagcacatctttgttaactctctgtctctgtctaacttatttctacttttttgagagagggtttcatcatgtagcccagactgtcctggaatgcgttatgtagaccaggctgttaattagctctcagtggatgccttttcttgcctctaccacaccggttcactctttgacaagtcaactggattaatctgcaagtgcagtaatgcagctttaaatgtaattatttcgaatctgttgtcctattcctttgtacacacgtatcagaaggcaaagtgagtcattgaaaagccacggaggaagcattgtgagtgaatggtgagctcactgtgactcacagtgtggggaaagaaactggaactgaccctccagcctcagagcagagctcctcagagcttcagcagtctgccggatttcacaaccatctgggcccagggggtgtagaagggggaggggctcctgggataggggaaaggctgccaggaggccacctgccagcctcagcctagctttgtcctggagggagagtcctccctgtgtctgtttcctttgccccaagtccactgggatgcagtccagaggtgtggctgaacacagagggccagtgcctagtttcacattgatgggtaaaagtaggggctgcttcttctctttctaaaccggccattctttctctggatctggctgccgcaggggcatgctctctagcctttggtccaggtttcctggagagctcagacctccagggctctgggggagaactctgctcagcactgcaaacctatacgtcctgttggcctgatatatttccattgttggagagtagagtggtgtgggctagagagannnnnnnnnnnnnnnnnnnnggtgtgttttcaaaactcagtatttattctgattttagtgtatgagtgcttgcttgaatgtatgaccacagagcccatagaggtgtggctcctgtggaactgctgtgagccacatacgtgctgggaagggaagtctgcccaagcagccgtgctctaagcctgagcatcccctggacctcaccttactgaccctgttctgcagacatgaagggttctgcaggtggagtagatgacctggaagggaaagtagaggtgtggcttggcatggtggcacacactggctatcccaggactaggatggtagaggcagggggaccttaagtttgtagaggcttggactacattaaaaaacaaaaaccaaataaacaccaccaccaccctgtctcaacaccaacactgacaagcaaacacctggatttgaggcagacctggtctgcccgttgcttcccatgtgactaacccaggacacattgatcagctgagcattgagatccttatttgaaaaaggaggctccttacaccttcgccccttcacagtgcaggaatccaacactcaggacctgaacctgggctcttacaaatatgttcagtctgaattctaaaaaagcattactctgactccccagatggggcagaaggagcattgctgcatgtaaacatcctctttccttacacacgaattcagaaaactgataggtacttacagcacctggtggcaaatcgtagctatgctcagtaagaccagatgctagatgg

SEQ ID NO: 1401 - DNA, 2596 bp, Mus musculus
gcagtgcgagctgagtgtggagcccgaggccgagggcgactgctctcgctgccccagtctgccggccgcccggccccggctgcggagccgctctgccgcccgccgtcccgcgtagaaggaagcatgctgaccgtcggctgcacgctgttggtcgccctgctggccgcgcccgcggtcgcgctggtcctcgggagctgccgcgcgctggaggtggcaaatggcacagtgacaagcctgccaggggccaccgttaccctgatttgccccgggaaggaagcagcaggcaatgttaccattcactgggtgtactctggctcacaaaacagagaatggactaccacaggaaacacactggttctgagggacgtgcagctcagcgacactggggactatttatgctccctgaatgatcacctggtggggactgtgcccttgctggtggatgttcccccagaggagcccaagctctcctgcttccggaagaacccccttgtcaacgccatctgtgagtggcgtccgagcagcaccccctctccaaccacgaaggctgtgctgtttgcaaagaaaatcaacaccaccaacgggaagagtgacttccaggtgccctgtcagtattctcagcagctgaaaagcttctcctgccaggtggagatcctggagggtgacaaagtataccacatagtgtcactgtgcgttgcaaacagtgtgggaagcaagtccagccacaacgaagcgtttcacagcttaaaaatggtgcagccggatccacctgccaaccttgtggtatcagccatacctggaaggccgcgctggctcaaagtcagctggcagcaccctgagacctgggacccgagttactacttgctgcagttccagcttcgataccgacctgtatggtcaaaggagttcacggtgttgctgctcccggtggcccagtaccaatgcgtcatccatgatgccttgcgaggagtgaagcacgtggtccaggtccgtgggaaggaggagcttgaccttggccagtggagcgaatggtccccagaggtcacgggcactccttggatagcagagcccaggaccaccccggcaggaatcctctggaaccccacacaggtctctgttgaagactctgccaaccacgaggatcagtacgaaagttctacagaagcaacgagtgtcctcgccccagtgcaagaatcctcgtccatgtccctgcccacattcctggtagctggaggaagcttggcgtttgggttgcttctctgtgtcttcatcatcctgagactcaagcagaaatggaagtcagaggctgagaaggaaagcaagacgacctctcctccacccccaccgtattccttgggcccactgaagccgaccttccttctggttcctctcctcaccccacacagctctgggtctgacaataccgtaaaccacagctgcctgggtgtcagggacgcacagagcccttatgacaacagcaacagagactacttattccccagataatcatctggatggtacctggcagctggcagggcaccacgagatcagcacacaagtttctcatgcgggtcccatccacctggggtggggtggggcgggcggggctgcagcttcactaacccacaagagctctgcacaggttctgagtaggtgcagctggtgctgcataggctctgaaggaaggaaggggctgtgaggaacacaggccattgtgaagacagcttgtgatgactgaatagagatgcccgtcagctccacatctgatagtggctcacaagctgcaccctcaggaggcctcagaaaggggctccaaaggctgccccagctgcctcgctctgcctcactgccccaagccaccttttagctctcgaactcctaaagtccaagcactttgccattctctttccgaggccactgaggccgggtggaagcttggttccgatttccttctcaacatctggaaagcagctgggcccggtggtggtgactaatatctcagggcctgatggtttacgcgagtgacaatttctcacaagcagtttttaaatgtgaatgatgaccccaggcactgctggctgcggaggcttcattttcctcttcgatctcaggacttcaggcgaaaagcggagtggaagtagagagcggatgggtgtccaccgtcctcatggtacttgcgggaggtacagcctggaaaacacgtttcctgtccccctactctcccaggagagggatgatggtagggggtgcctcttccagggcggagagaactactttaccccagccttgcccattctgatttcaactggactggagctactaggaaagtcgacattcatgcaaaaagaaaaaacgttaactagcaagaatgcactttcattttggtttttagagaactgttgcctgtttctctcaagagtctggaagaggccgctcactgcacactactgtatgaaccctcactgcccaccctggaggaccaagtgcagtaacggtagcccaaacaccaagtcaagtgaaaatcgagggaaaaaaaaaacaaacaagcaacaaaaaaaaaaaaccaaaactaaactaaaaaacaaatcaccccccc

SEQ ID NO: 1402 - protein, 454 aa, Mus musculus
MLTVGCTLLVLAAPAVVLGSCRALEVANGTVTSLPGATVTLICPGKEAAGNVTIHWVYSGSQNREWTTTGNTLVLRDVQLSDTGDYLCSLNDHLVGTVPLLVDVPPEEPKLSCFRKNPLVNAICEWRPSSTPSPTTKAVLFAKKINTTNGKSDFQVPCQYSQQLKSFSCQVEIGDKVYHIVSLCVANSVGSKSSHNEAFHSLKMVQPDPPANLVVSAIPGRPRWLKVSWQHPETWDPSYYLLQFQLRYRPVWSKEFTVLLLPVAQYQCVIHDALRGVKHVVQVRGKEELDLGQWSEWSPEVTGTPWIAEPRTTPAGILWNPTQVSVEDSANHEDQYESSTEATSVLAPVQESSSMSLPTFLVAGGSLAFGLLLCVFIILRLKQKWKSEAEKESKTTSPPPPPYSLGPLKPTFLLVPLLTPHSSGSDNTVNHSCLGVRDAQSPYDNSNRDYLFPR

SEQ ID NO: 1403 - DNA, 84105 bp, Homo sapiens
caatctcggctctctgcaacctccgcctcctgggttcaagcgattcttgtgcctcagcctcccgagtagctgggactgcaggcgcctgccatcacacctggttaatttttgtatttttagtagagatggggtttcaccatgttggccaagatggtctcgatctcctgacctcgtgatcctcctgcctcagcccccgcaaagtgctgggattacagacgtgagccaccgcacccggcctagagttttctacatatcagatcatgtcatctgtgagcagagataattttacttctttctggcccagtgcggggctcacgcctgtaatcccagcactttgggaggccaaggcaggcagatcacgaggtcaggagatcgagaccacggtgaaaccccatctctactaacaatacagaaaattagccaggtgtggtggcaggcgcctgtagtcccagctactcgggaggctgaggcaggagaatggcgtgaacccgggaggcagagcttgcagtgagctgagatcgcaacactgtactccagcctgggtgacagagcgagactctgtctcaaaaaaaaaaaaaattttttttttttacttctttctttccaatttggatgcctttaatttctttttcttgccttattgctctggctacaaattgttatattatgttgaacagaagtggcaaaagtgggcatacttgtcttgtttcagatcttagagagaaaagcttttattccttcaccatgaaatatgttagctgtgggtttttaaaaatacggccttcattcttacttccacatttattaaataagaccttgaataaagtcatgaatataactttttattcataaaacaattatttattgagtgcctactctgtgcctagtattgttttatgcactgaagataaagcaatggctagacagacacagtgcccatgggaatgtgtagaaggattttaagcagaaaaataacatgatctaatttacatgtttttaaagcatcctggctgaaatggggagaatagattgaagtggaaatacttaatgggagaaatcagtggttcatactttagaagtctgagagagatggtagttaacttggacatgtatggtagcagtgaatgtggagagaggcagatggatttgaaatctcttctcgaggttgaagcaacattgtaagaactggatgacagaggagaggaagaaggagttaaggatgattcttaggtttctgacatgagcaaatggtgggacaagtcccttagatagagaatataaggggagagcaagtagtgacaggaagatgaggctcgggtttggatatgttgagtttgagatgtgtatgagatctccaactgcagatgtcaggcaggtagtggtagcacagggaaagttgcttcttaagatgggagagactatagcatgttaaatgctgattggtaggattcactggagagggagaggtttaacacaggagaagagagggataactcacggcttaaggttctagagaagaggggtaggagtaatccttggagatattagcattagatgagaagggcaaaatctgtgccttatttatctttgaatttgttgtagtggggagaggggcaaaaaaagtctggcacatggctgtcattaatgaataattatcaggctggatgcagtggctcacgtctgtaatcacagcactttgggaggccgaggagtgtgaatcacctgaggtcaggagtttgaggccagcctggccaacatggtgaaaccccatctctactaaacatacaaaaattaaattagcttgcccacgaacacttgttattatatgactttttgattatagcaagttcaaatactttatttatttgagatggaatcttgctctgtcacccaggctggagtgcggtggcatgatcttggctcactgcaaccttggcctcctgggttcaagagattctcatgcctcagcctccagagtagctgggattacagacatgcaccaccacgccccactaatttttgtatttgtatatatttttttggagatggagtctcactctgtggcccagattggagtgtagtggcggtgggggatctcagctcactgcaacccccacctcccaagttcaagtgattctcctgcctcagcttcccaagtagctgagattacaggtgtgcaccaccacatccggccaatttttgtattttgtattcaccatgttggccaggctggtcttgaactcctgacctcaagtgacctgctcacctcagcctcccaaagtgctaggattacaggtgtgagacaccgcgcccgacctaatttttgtaattttagtagcaatgaggtttttccctgttggccaggctgctctcaaactcctgccctcaggtgatccgcttgccttggcctctcaaagttttgggattacaggcgtgagccaccgcgcccagccttatttttattttgttttttacctttcctatggtgctgaaaaaacttttaatctttatgctgtattgcttcaaatttattaaaattatggtcagcctaatccattttatgggccagaaaattgtacagcatgtttagaaaaaaagatttatgtaatggttaatataaataaggttttttccttggagggaaatttcacttaacagaaaaaaatcgattctaactaatatccaccttcttcctcttctccctggaatggatgaggttaccatatgtacagattattgtcattatcaggctgagcatttactgggtgccaggattgtattaagtactgtaggtagttttctcagttaatcctcacaataaccctgtgcagtagacactcttaatattcccattttatagaaaaggacagtgaagtttagataaaattacagcatccaaggtcccagctggtcaatggcagagctagatttgaactcaggcagtttggctcaggaatctgcttacatgtctgtgtctacataaatagctcggcatagacaaatgattgctaaagagcatgctaataatgaatgcaaatggaacacatgattggcaagtgaagggtaattattactcaaccctcattctgcacaaatccacagcataatgcagcctctgctgggaagtgtaagagcaaatagctcacgcatatgtgtgaagtccaagtttagactatcttccaggaaaggtacaatggcaggcagaggtagtaactgcagggccctagctctgacaagagattactgttaacagcagaagcaaacccgactgaaactgttaagtcagctagtacagtaagtcctcacttaaccttgttaacaggttctcgaaaactgtgactttaagcaaaacaacgtataatgaaaccaattttaccataggccaattgatatgaactagagttaagtttctacgacatttctggtcacaaagatgtaaccaaacttctaaataaagaccccaaacactgctaatatcaaacattgaaataaatgtgagctatatatacatttaagaaagattaataaaagcaatgaagaaaattatgtacccatttatttcagtttagtgtctctgttgtgggtggcggagcctggaacctatcacagcaacttggtgcaaggcaagaaacagccccagacaggacgctatcccatcacagggtacacactatcccatcacagggtacacacacacacacacacacacacacactctctctctctctcgctctctctctctatgtctctctcagactgggacagtttagacatgctaattaacataacgggcacatcccagagtaccagaagaaaacccacacagatatgggggaagcatgcaaactccacacagacaggggcccaggctgggaatctatttttttttccttattaaaattatcacttagcctggtgtggtggtgtgcacctgtagtcccagctactcgggaggctaaggcaggagaatcgcttgaatccagaaggcagaggttgcagtgagccaagatggcgccactgcaccagcctgggcggcaacagagcaagacgtcatctcaaaaaaatattatttcggccaggcacagtggctcacacctgtaatcccagcactttgggaggcccacgcggctggattacctgaggtcaggagttggagaccagcctgaccaacgtggtgaaaccccatctctactaaaaatacaaaaattagccaggcatggtggcacattcctgtaatcccagctacttgggaggctgaggcaggagaatcgcttgaactcaggaggcggcggttgcagtgggccgagatcgtgccattgcactccagcctgggcaacaagagtgaaactctgtctcaaaaaaaaaaaaaaaaaaaaaaaaaaaaaaatatatatatatatatatataatttcaaaacattgacctaaacgatgtcatcagaagacctgctaccaatggccttccattttaaatccatgcagcttctgagaaggggcctcacagagcagctaatgaccaaattctacttcaacatcttcattttatgggtgatataatgaattatattttaaaaaacatttggatgaacttctgtgtctagaaagaatacgttttgggaaagtttacttatttacatttatttaacaaaccctcatatagagtttatcatgtattgtcattgttataaatgttttacatatgttaactaatttaattcccattagaattctatgagggtacttcccccctattttttagatgacgacattgagacacagagaagttgagtgacttgttcagagacaaacagctgataagtggcagagctaagatttgaacccagacactttggctccagagtttgtgttcatagaattatattgtatagtgcaccaaaaaaagtgcactatctttaaggaatctcgttatatatcctttaaaaatatgagttatcttcccttccccaccaactcaataatgcaatctgttttctggatttccaagcatctagcttgtttaattttataattgcgatgctttattaaaaatgtggtaaaatatacaaaacatgaaatttcccattttagctttttatttatttatttaagataaggaaggtctttttctgtcccccaggctggagtacagtggcgccgtcatagcttgctgcatcctcaaactccttgcctcaagctatctttccaagtagctgggactacagatgtgggtcaccatgtccggctaatttttaaattttttgtagagatagggtcttgctatgttgaccaggctagccttgaacgcctggcctcaagcaatccccctcatttgggcattttaaccattttttaaatggttcagtggcattaagcacatgcacattattgtgaaactataaccactatccatctccagaactcttttcatcttgcaaaaacggaagttctgtacccattaaacaataacttcccgctctcctcctactaacccctggcagctaccactctgcttcctatctctattaatttgactactctaggtacctcatataaatgaaatcatataatatttgtccttttgtgtctggtttatttcacttagcataatgtcttcaaggtttatcatgttgtagcatatgtcagaatttccttcctttttaagactgagtaatatttcattatatgtacataccacatttttttatccattcatctcttgatggacttttgaattgtttctactttttggctattgtaaataatgctgctaaaaatacgggtgtacaaatatctgtttgagtccctgctttcaatttttttgtgaatatatccagaagtggaactgccggattatatgacaattctacatttaattttaattgtgatgctatttatttatttatttatttatttatttatttatttattgagacagagtcttgctgtgttgcccaggctggagtgcagtggcacaatcttggctcactgtaacctccgcctcctgggttcaagagattcttgtgcctcagcctcccaagtagctgggattacaggaatgcgccaccaggccaggctaatttttgtatttttagtaaagatggggtttcaccatgatggccaggctgatctcaaactcctgacctcagatgatctgcccgccttggcctcccaaagtgttgggattacaggtgtgaggcattgtgcctggccctatttttatttttatttttaaagacggggtcttgctcggtggcccaggctggagtgccaaaggtgtaatcataggtcactgcagccttgacctcctgggctcatgcagttctcctgcctcaatctcccaagcagctgagactacaggcatgtgccactatgcccagctataactgtgatgctttttagcagttaaaaatcataacattctctaaatattacaagaaggggataaacttttatgaaccctttctgagaatggtgctaaacaaatcccttttctgggtgtaaactcacctggtgaggcaatggggagccagactgtcatgctgccggagccagggatgctgcattcctccactgtgaaagcgagggtctccacaggcaggctgaggccctcagtgggccctggctggggcctgactctgagggatgccactggccagacactgagttctgttattagacctctgtctgcccacgtaacctcctcccaggctgatgagaaagcaggaggggaaggtttcagagaataagaagcaccttcctgtaattattgattaaccaggggctggctccagggccagaggccagggaggggtctgcaggtcagttcagccctaccccactgcacttctcagaataatcgttgtccctaaagatggattcacatggtgaatagagaataaagtgcatagttttaaactctcacagttgagaatggccccaacacatcagcccagacctggaggttgggggcagggtgggaatttaaaaagaccactttgagtcagggtatctgggatcttgaccagctctgtcaccactgcctgtgccatctttaccaagcaacttctcttcttgaggcctagctccttatctaaaaagtgagggaggagaagcaatgatgaccaagtcccttttggtttcaaaataaccttacatatttattctgtgggtctcctgtagacttctgctttaggcaaactttaagatgcttcatcgcttcaggtgaaaggtgagagaggacttgcttgctgggagtcagcctagggcttccccctttacaggagacggagggtccctgcaggaacaccggtgaaggagagggtgtcccacacaccaggttctgctctctgctctcccctcacagactacagaacaccaagtgcctgctgccatggtctgcagtgtctttggtcctgggtgggccgaccgagcccttgctcagtgagagtcctgggccaggagccagacctcaccctggagctgccagttactagtagtgcagttttgaacaagccactttacctctgttagcctcagtctactcatctgaaaattgggggcaatgtctcccagcattcagggttgagaatttcagaggagattgtgtatgtaaagcaatttgtaagcagcacagttatctgagaagtgttctggctcagacaactaaagtcttcattgttccttctgttgtctgggtgagggcaggtcaggctgaattgtgcaggtatgctttcttctctttcttttttctttttcttttcttttttttgagagggagtttcgttcttcttgcccaggctggagtgcagtggtgccatctcggttcactgcaacctccgcctcctgggttcaagtgattctcctgcctcagcctcctgagtagctgggactaccggtacgcaccaccatgcccggctaatttttgtatttttagtagagatgtggttttaccatgttggtcaggctggtctcgaactcctgacctcatgatctgcccaccttggcctcccaaagtgctggaattacaggtgtgaggcaccacgtccggcctggccaggattaaattttttcatgtgaaccacaacactaaaactttgtatattgctgcgcttatcttacaaatcaggaaataggggttcagagaagttaaatagcttgcttaagtcacacagccagcaagtggtaaagctgggatctgcatgactacagagcacacaggctccccaccagtagattagagagggggaggtctgctttggtgcagagacaggtgggatctgtgatgcccgttcttggtttcaacattcttttaaactctcctatctgagcctaggactttctgcagccttcctgttttaggctggcagctcacagtccctctctggttattttcaggtctgtgtgtgccacagagaggaagggggcaaccacagtgggaaccgctttccagccctgctgcaaccccttttgaaatagcaggcgagagggctggtggcctccactgtgctcttctgttcctgtctgtgggcatggctaaagcaaacaagctcacccacaccagctcccatcgtgcggtggatcagtgcatgtgcttggttctgtctggcactgctgatgggtggttcctacagaaagatccagatgcacggggtctgaggactgtttcagaagctctgtccgtccatgcttggccctgtccacttgggagttccattaggccatgcctgttccagctgtcccaggatctttgatctgggttaggattggcctgaaaccaaaggtagaaaaacacattctaatgagcagttgctggtctagaagcttctcagcctaaactttatttcagcatttttctttccctccagattcagctatgaggccatcctatcagctttaggctctgtgggggtccttgagagagttcccctccaagggacggacagatggtccccttcaaggtccttgtggttgctcaaaagccaggtgcttgtttctttctttttttctctccttcctttccttccttcccctctatccctccttccctccctccctccctcctcccttccttttctttctttcttttcttttttttttttctttccagacagggtctcactgtcatccaggctggagtagcagcccccaatcacggctcactgtaccctggatctcccggactcaagcaattttcccacctcagcttccctagtagctgggactataggtgtgtaccaccacacccagctaatttttaaatttttttatagaaatgggggtctcactttgttacacaggctggtctagaattcctggactgaagcaatccacccacccggctctcccaaagtgttggggttacaggcgtgagccactgcccctggtgttagtgtctgtctgtcaagtcaggagggcagccatgaacgttctgatgtctactgagcacgtgtggcccagaccgtgtgtcaggtgtttaggtgccatccacagaaccttcctaataaccctgggcagcataggctttcttatctctgacagatgaggaaatggagactcagattctgaaccgaagtcacagacacagtagatggtaggtctaaatggggacccaggtctatctgactgcaaagtccaaaccgtttccttgcctctgctgcagcctgcgaggagcagctgggcagaaagactgtgcctttacggtggtgagtcttccgatgcccaagcctcaccccagaccgatgaaatcagaatctctggagacccgacccagacattggtgggttttagggctcctggctgattccagtgggcaaccgggctaccaagcactgttttaccctaagggtaagaggaacatcgcctcctcgagggctctccaggtgtgcctttcacagcgtaatcccgttcacgaaaccaaaaatcaaaactaggccactgcccactggtggctgatacgcccttttctcatcaacagaaccgggaggaagggctctggtggggctggcggtcccctgttctccccgctcaggtgcggcgctgtggcaggaagccaccccctcggtcggccggtgcgcggggctgttgcgccatccgctccggctttcgtaaccgcaccctgggacggcccagagacgctccagcgcgagttcctcaaatgttttcctgcgttgccaggaccgtccgccgctctgagtcatgtgcgagtgggaagtcgcactgacactgagccgggccagagggagaggagccgagcgcggcgcggggccgagggactcgcagtgtgtgtagagagccgggctcctgcggatgggggctgcccccggggcctgagcccgcctgcccgcccaccgccccgccccgcccctgccacccctgccgcccggttcccattagcctgtccgcctctgcgggaccatggagtggtagccgaggaggaagcatgctggccgtcggctgcgcgctgctggctgccctgctggccgcgccgggagcggcgctggccccaaggcgctgccctgcgcagggtaagggcttcgggcgcacctggagggctggggcagctagcggctgggggaaaccgccttggtcaccgcagtctgtgggaggctggagggaggaaaggaggtgcgacggatccccttttctgtggctgccttgaggccccgcgggtacctagctgtgtggtcgcgggtagtggctcttgcgccccctgctgcgcttgctcccttggtccggagcgctccccggaatgcccggtgaagctgtgcgggaaccctgcggtctgtgtacaggactgtgtccttgcaaacctgactctcgagcttccttcccagtgcccccaggagcctttacacaaccgcgtcccaggttactctaaggggagactgcccgagagggcgcgccccagcggggtgatgtacccgcctggggagtcctttgtaccagcgcccctcttctccctctgcattgggggtccacctcgcctggtcctccccccacccccgcgggtgcatgtgtggatgacagtgccctgactatgaagggactgacatcacgggcgctgagtcacggatcttcccgctgcacggagtcactttggcagccaccaactctgggaagccaagtgccccagtcctgggaattgagtcgggaggctggcaagggagtgagacctcctggggctggcacgtgctggactcccctctagaaaagagaaggacccgtgagggagagggcagaggcacttactgctcccgttgactgtaatctgcccctggcaaaccaggcttttcttgggctctggccgcatgcccagctgcgtgtctagtctctcttctggaagagttgggcaactggctctccagaggtttattttagggtcccagtgcttctttgaggacacagcagaaaactaaggggcagctgacaggcttctggaacagctgacaggctggggaggctgaaggctaagactttcaaccactagatcacactgaattccagtcctaggtgaacactgatctctccctttgaggaggtgactttctgcaactagaggctgagctggagtgtctgaggctctctttgctttttggatggttgtggtccttatgattggaagaaaaaaagaagggattccattttcaatacacatttataactcctgccagtaacagacactgttgattggggcacccattcaatgttttctaatcctccactgtatctacatataactttgtttgaaagaggagactgaggttcagggaggttgggatggcgggatggcaggttgtcaggccccggtgatggaggccaacccctcccgtggctctgtgctccagtgtggtagatgtctaagactctcaaatatagaactagatcagcaggcagagctgggggcattggggcaagctgagagtcactcttgtctggctgagtgctgggacagaaaaggctgagggagggaagtggaggcccaggcttgcccatggtggtgttagagggatgcaagacaggttccagggctcggatggcctcaggagcaagcagggctcccttggctgcctctgctgctgtcacgccagcccaaggctcctgccccagggaggttactgttactgctgtagttgccaccacctgttgctcctgagtggatgctaggcccttccagggcagccagttacagtcagttttccatttccctggtgctcaggaaggattaggagaggtggtctcatggcctgaacagcccatgaaaggcagaactgagagactggggaggaagtgaaagtcctcccagctcagaaggaaaatgcagagaagtagaaatacccagcccctctcccacacccacacagactcagcccacaaactggagagtaaaaataaagaaatcgtacaggaagcatggagcaaatgactgtgagatgtttcgctttagagaagtgaggagcagagggggagcagaggctggagttggctgagaggggaaatccgcaggtacagcctgcggggctcttagagcccagaggtttgttttcctcgggatcagctgccgcccacacaccctggagctgccaggacttctcaggtgtactcgttgtctaagggcctggactagctgggacttaggcttctgccggttccaacactctggtgctggaaggctggacttgggtgactcaagttccctcttcctactgcaatgcaagaaaatacacaaaagaagtatgtatacctttaagtatctcaaagagctatctcagcttctgaatttccttctagggcacctcttcctgcccccattacccacacacgtgcctagcctcaccctaaatcagtatttctcaaaagcttagttctgagcctagcatcagatctggtgtgtgtgctgggtgggagggctttggtaaacatgatgatttttgaaccctaacccagatttattaaataagaacacctaggagtgaggcctggggcatgtccttttaaacaaactgccccttgtgattcttaggcactgtcaggtttgaggacggctgcctaaatggtgtcattgaggaactgaatgaaggccctcccgcttcgggctctctgttgccagaaatctctccttgctttggcttgctgcttgtttattcattgcagcaaacatttcttgagtcggtgtagagcctgtgaggcctgtgtaggatcagctatgcagactccaccctaaaaggagcctgaaaatggtcatgggtaaatcctgagaagggctgagaaaccccagactctgaccgggccactgggtaccaactacccgtgaacagattgtctggcttggggtagggggtggttagagagaggaagttcctctgactgaggaccaagatcccaaggcagcaggcacactgatcctgaccctgaccctcatctccagccctcagcagccagggtaaacaaatactcccctcactgggtatttgtagattacacaaagtaacctaggtgctgactgctgaaaatatacactcccttcccccgtctcctgaatcctggtcccaccaggcctggaagccacagacccagcaagcaaaagagtttccagtcaatgaatctagtctggattgaagctgtgctctgtaatacggtagccactagccacgtgtacctatttaaatttaaattatgccagcgcagtgactcacgcctgtaatcccagtactttgggaggctgaggcaggaggatctcttgagctcaggagttggagaccagcctgggcaacagggtgagatgccgtctctacaaaaagatttaaaaaattagctgggcacagtgacatgagcctgtagtccctgctactgagaaggctgaggtgggagaatcacttgagtccagtctgcatggagccatgtttgcactaccgaattccagtctgggcgacaggagaccctgtctccaaaaaattaatttaaatgaaatcaaataaaaacttagtttcttagttgcactagtcacattttaagtgctcaacactcacattgctagtggctactgtactgaacagtgcagatacagatctcttccatcatcgtggaaagccctactggacggtgctgggctagagtgttaaccagtttcttccagaggttttctgttctcttttcctttatccccctctgccttctgctctcctccacctgaacacagctcattttgcataggtgatggctaaggtcttcaagccaggcacatctctgccctgcactgccaagtaaaaatgataacaccttgggcaagtgatttaacttctttgacagccagtgttctagaaaatagaaataattgtattacctcgaagggtggttatgaagatgagatgagctaagtaaggtattaaatagagtgtttacagaagtccctaacacacagcaagtgcttaaataagtgtaggtgatcattcattcactccaaaaatatatttttggagtgaacacctcctactctgttccaggcactattctaagagctggagatacaccatgaataaaagagacaaaaaccccaggcttagttgagtttcattctagtgtgggagactattaacaggatgtaaattaagtatgtggtatgctagcgactagtgctaaggagaaaaactaaagccgagagggagacagaccccatgtgtgtttgtggcagggtggggtggcatggtgccttggatgggaggccagggaatgccttgctgagaacataatatttgagtgaagacctgaagaaaatatacaaatctctagagattccctatatgtccatcttgggcaggaaaattcttgcctcctctttaacaatgtgtactacctgagggtgtgttatgttctggagcagagggctctgtggggacacatggatgctccctgccctggagaagtatctctggggtaacaagtcctcagccctttagctccttgaagtctagcagagggaagtgctaaatgccaggtcataactgcaagtctgcaggtgggatccttgagggctggagtggcaaggggaaggtgacaaagaaaaggccttttttttttttttaaatacaggatcttactcccgtagcccaggttggagtgcagtggcacaatcactgctcactgcagcctcgacttcctggtctcaggtgatcctcccacctcagcttccggaatagctgggactacaggcgtgcaccaccacatctggctaattttttgtatttcttgtagagacaggatttcgccatgttgcaggctgctctggaacacctaggctcaagcagttcacccgccttggcctcccaaagtgctgggattacaggcgtgagcctttgtgtccagctgggaggtttttttgtgtagttaatctgtgttctttaccctctcctcttgcctgggatctgaagaggtcaaaagtccctggcaaaggcagaggcttttctgccactgggttcaggcttgacgttagctggacctcagcagcctcccccactcctgctcatcccttgccagctctgtcgggtgctttctactcttaggagtatgtccctgaggccctgcatccagcctattctccccagcacctgttctctgaatcagttcccactccacttcccaaccgctttcccgaaaagcatcctttggtcttccctctctatatgatggttacaataactgttaccatttatggtgtgtcaactgtgtgcaagtagctgtgctaggcccttggcatctgtgatctcatgtaatcttcaaaacagcctcaggtgagagaagtgctggccccattgcatagatggtgggctgtaggacaagatgagaggccagttttgcacatatggaaacaaatgtcttttgttttcgtttttgttttgagacagagtctctgtctcccaggctggagtgcagtggtgcaatcttggctcactgcaacctctgcctcccgggttcaagcgattctcctgcctctgcctccagagtagctggcattacgggtgcacaccaccacacctggctaatttttgtatttttagtagagatggggtttcaccaggttgccagtctggtctcgaactcctgacctcaagtgatctgcctgcctcggcctcccaaagtgctataggattgcaggcatgagccaccgcgcctggccgcaacgagacaatcaagagaagatgctgataaggagttggatatgggagtcaggaatttgggaatgaggactgagcttgagatgtaaatgtgggagtcgtgtgctggcagatattatttcaagccctgagagtggctgaggtcccccacatctattcatatgcctttggtcagtggaatgttttgcaatccacatcactataaatgaatttcctctgtctctgagagaggccgctgaggtagcagagagaaaacagctttgagggcaggcagtccaggcctgtctccccattaactgcttcaccagctaggggacctttgggcaagtcactacaagctttaaagtataaaatactttttgaggccggatgtggtgtatcatgtctgtcatcccagtgctttaggaggccaaggcaggaggatcacttgagcccaggagttcgaggctgcagtgaaccgtgacagcaacactgcactccaacctgggtgacaaagcaagaccctgtctcaacaacaacaacaacaaaagtataaaatactgtaacagacaaaaatgcatgcttgataaatgttattgatcctaagagccttttttttttttttttttgagatggagtcttgctctgtcgcccaggctggagtgcagtggcgcgatctcagctcactgcaacatccgcctcccaggttcacgcagttctcctgcctcagcctcccgagtagctgggactacaggcatccgccacgacgcctggctaattttttgtatttttagtagagacggggtttcactgtgtcagccaggagagtcttgatctcctgaccttgtgatctgcccacctcgtcctctcaaagtgctgggattacaggtgtgagccaccgtgcccggtgagccttttttttttgtttttgttttgagacagagtctcactgtgttgcccaggctggagtgcagtggcacaatctcagctcactgcaacctctgcctcccaggttcaagcaattctcctgcctcagcctcctggcctcagctgggattactggtgcctgccaccacacccggctaatttttttgtatttttagtagagacggggtttcaccatgttggccaggctggtctcgaactcctgacctcaggtgatccacccaccttggcctcccaaagtgctgggattacagacgtgagctaccgcgcccggcctttaaaagcctattttgatgggaggagggggatgctataatgtgaggactttctcccagaaaaggagagagaggcactaatgcagtggggataataattaaaatcgcttaacattttttttgaaagattaggtatgttctgaaaatagtgctgaggtttttgcattaattatctaatgtaatcctgacaacatttgaagtacctatggttattatttctattttatggatgagaaaagtgaggcctagagaggttgagaaacaagcccaaagtcacacagctagtgagtgactgagatagggttggaacttgggtatatctgaatcctgggcttgacctgtagacccctgctcctgtggactaggaaatttaaacaaagaacttcctctttttttttttttttgtatttcattatatggatgtactgagtttatttatctggttccccccctttttttttttgagacagagtcttgctctgtcgctcagacttgagtgcagtggcacgatgttggctcactgcaacctctgcctcccgggttcaagcaattctcctgcctcagcctcccgagtagctgggattacaggcatgcaccaccaagccaggctaatttttgtatttttagtagagatggggtttcaccatgttggccaggctggtctcaaactcctgacctcgtgatccacccaccttggcctcccaaagtgctgggattacaggcatgggccactgtgtccggccacccggttaccttttgatggatgtttagttgttcccttcttgctcttacggcccctgctgtggggaataactttgcatatgcctcttgttgtgtgagtgcaagtacacctgcaggatatattccccgaaggggaattgatgggcaaaggccatgagatttgtcatcgtgagacagaatagaagttgcaccaatttatacttccagcagcattgtgagaatgcttgtgtccctatgcccttgccaaaagtgtactattaacctggtatctacacagacaatggcgtctgtgtggaattaatttgcatttatcttatctgaataagattgtatgggttttttaatgtataactgacatttgcataatctactatgacctgcctgttcatattcaatgctaattttattttgattgggtcattaatcttattgtttacaggagctcttgacatattaacatgtcatacatgacttttttttttttttttttggtggtgggggtggtttttgccaagaaatttctttttttccatctctctctctctctctctttctttctcagggtctcacggtgtcacccaggctggagtgcagtgacatgctcatggctcactgcagcctcaatttcctgggactcaagcgatcctcctgtctcagacttctgagtatgaggctcagactcaaaagattggggcttttacaggtgcacaccaccacacttgactagcctttgtattttttgtagagacgggattttgccatgttgctcagactggtctcaaactctgggttcaagcgatcctccctccttggcctcccaaagtgctgggattacaggtgtgagccactgcgcctggctgcaaatttttttttccaactagttgaatttaccagtctcttttatagcttctaggttttgtgtcatacttaataacatccttcccattccaatattttatttttatttattttttgagagaatgtcaatccacctttattggaggaaaccttgcactgtaactgttttaaataatgtgtgccctgccccaccctgtgcctggtgggctcagaagatcatctccagctgccgggcatactcggtgacctgtttggccagttctgtggagggaatggtagtgtcttctggctcctgctgctggccggcaaaactatattagttgttggggcccgggacccaccctcacttcttggtgtagtcggtcatctttttgggtgtgttgaagaagaggatctggtggcctcggtaaaagggattttctcataggctttcttgatgcacccggccatctcatccctgatagtgtcaagcaggatgtcgatgaagacggtgtagctcttggcgaggatgttacccttggccaggaacactttgttgtagctgccctccattaggtattgctccagggacacagggtttttggtgtagacattggtctggatgtccttggcaggcagccactccagctccatgtggaactcagccacccgcttctgggacagcaggaagaggagattgaggcccaagagctggtgcatgtaggctgactggggaagctgttccttgtaatcaaagtagcagcatttgagctgggtcatgtggcgctggaaggaggggatgtcctcgcataggatgctccactggccccgatcttcagtatgtcacgggccagaatgagctgctgtttggtcagcttggtccctgtggttggcaagaagttgagctccagaagaactagcttgaggcagcccagctcttccctgcacttgctaagattggggcttttacggttccactcgcccttgagttgcttgtacttgccgtcctcagcctgcaggacagggccctaggtcgccaggggcccggagctcaaggcgccggctgcactgttcacctccacccccattccaatattttaaaagattctccttttctggtattgttaaaagttttaaaagtttaaatatttgatccattttgaatttattaatattatggatgaggtatgaagtctgactccagctttttctttccagttgtcacctgacatctctttacagtttattgaattcatctttcccccaccaattttcaaagttacattttaaatctaccaaattcctgtatacttgggtttatacgcctcttggcatagcgagtagttaaaagcacaaattctgaggcccaattgtctggacttgaatgcaggtcacccctaattagctatataacctcagtctcttcttctgtcaaatagactattgagaagatcaagttagttaatctatgtagcacacttagaaactgcctgtatgtgtagcaagcacttagactaagttatttttttaatgtggtaaaaacacataatataaaatgtatcagccgggtgcagtggctcacacctgtaatcccagcactttgggaggccgaggcaggtggatcatttgaggtcaggagtttgaaaccagcatgaccaacatggtgaaaccccatctctactaaaaatacaaaaagtagccagctgtggtgacaggcacctgtaatcccagctactccggaggctgaggcaagaggggaggcagaggttgcagtgagccacgattgtgccactgcactccagcctgggcgacaagagtaagactccatctcaaaaaaaaataaaataaaataaccattttaaagtatacagatcagtagtgcagactaaactattttttatttttattagttctgaactttctagtctcttccataatttggtctccctattcatgtgccagtatcgcactgttttaattatgtagttttattttttccttcctatttttttagaggaagggtctcactctgttgccaaggctggagtgcagtgtctcgatcatagctcactgcaaccttgaactcctggactcacgcaatcctcttgccttggctttctgagtagccaggaccacaggtgcatgacaccatgactggctaatttaaaaaaaaatttttttttttttttttgtagagatggagttttgctatgttgcctaggctggtcttgagctcctggtctcaagagatcctcccgcctcagcctcccaaagtgttggcattacaggcatgagccactgcacctggccaagtaaactttagagattaattagggaacactgatgtatttttaatgccgagtcttcctatctcttggtaggcctgatggggcttatgatgagggaggaggagctggggcaggagagcccgacattcaggtctcactgaggggagatgtgcccaggacacttccactggaactgcttccttgatggtgatgtggagtgagctggaccagtgtgtgcgtgcatgtgtctacccaagctcatggcacatgggggagcggagggggtggggatggctcagcagtgattggaatgcaagagtggggactttggggcctgtatgaaaaagtgttatggcagagtgacacacctacgaaagagtgtggtcagcataggcctcacactgggtgggtttttacaaactgaacacatgcatggaaccaccattcagaataagaactgaacagaagcatcctcaggggagccctgaaatccccctatgcacacccctcaaacctccccttatccctcccagctgctccatccacacctccacgtgacttcttaaatcttcagctttgctgcctcatagctaagggggtcagggaggggaagctggggggtctgtagatatggaatgggggtgcgtacatcaggtccctccctctccctgccctcctgccaccttccagaagcacataaaaaaaatctgactgagggccagcctctttgttatactctgagactgtgctcagagatagaagacaagacccctaggccatgcttctgggaaggcagagggctgcgtgttaagcctggaccgagagtcccagagcccagctccggtcctgacaccatgcactgctgtgtgacttctgggccctggttctcctcatccaccaaaatgagcaggttggcctgagtcgtccttaagagtcctgtatagccttaaaacagcgctccttatctcagcaccctacacactggctgtagcttctcctcactgtccctttcaggaccaaaatactgggtgtatccatctgcaggtaccaatggctttcttctaaggccctgctgcgtcctgcttttaatctctttatttctctatctgctcctggggttaggtttgggccagggagtggattgtttgccctccttagatatcctttctttttttgagacagggttgcccagggtggagtgcagtggtgcgatctcggctcactgcaaactccatctccggggttcaagtgattctcctacctcagcctcccgagtagctgggattacaggcatgcaccactatgcccagctaatttttttttttttttttttttgagatggagtttcactcttgttgcccaggctggagtgcagtggcatgatctcagctcactgcaaccttccggtttcaagcgattctcctgcctcagcctcccaagtagctgggattacaggcacccgccaccatacccggctaatttttgtatttttagtagagacaggatttcaccatgttggccaagctgatctcaaactcctgaccttgtgatccgaccttctctgtctcccaaagtgctgggattacaggcgtgagccacttcacccggcctaatttttgtattttttggtatggatggggtttcaccattttggctaggctggtcttgaactcctgatctcaggtgatccgccagcctcagcctcccaaagtgctgagattacaggcgtgagctgccgcacatggccttagatatcttttcctctaattagtttataatctctgagagttgacccaggttgtaccttcttggactggagccaggtggttatctctgatgctgccagaggaggattagatgttttatctcctgagttggtcacacgcgcacgtgggtctctgagtcagcattgagcattacctgtttatgggtccaaaggagcctccctcccagaccctctctccagcagtgtacagtccatcgtgtggatgggaggaaggcaaggccaaggtaaatactgactcagacaaatacaagcaggtacaagaagtacaaatacatatgtgggggaggagggagcaggggcctgccagccaaagctagtcatctgagaagagggggttgcggacaggtggggctgggagctgagtcagagaaggttgctgggcctcccattagagcctgggagccttgacttgccgtagcctgcggccttgcctcttcctggacagtggccgagggtgccctctgaaatgttaaggagaaatgaatgggcccagatggtggggtgacttggggaggacgcgagatttggagtccaaggggaggcagttttaggctctaactcatcctatacacgctgcggctgtgggggaagggagagaaaggccaagggcacgactcctggctcctgagagtccccagtgccccattaggttggcagctgcagtgatggcgctgacccccccttgtgcacacccctcaagcctcagcattcccttccctgggcctctgaagggtggaaagatgtgagaagagcagggaagaggagaggaaattgggagagggggagagagagggtggtggggagcccagagaagggagctgggggtggagcatggagaggtacctgggccaagtagagagaggctttggccaggctcatctgggtccagcgtggattccctcatgcatgagctgtgtgaatttgggcaagttccctaacttctctgatctcttgttgcctcaacaatgaaatggggacaagacttcctccctggcagactttttgtgagtagtgtgctcttagggaaagcccagggcgcagggtaagtgtcccagttgctaatgattgttatggttattatcacatcaaagccaggagccagtctcagtccaaagatggagaatgcaagaacaggtgaccaagagcactgggacttgtcctagccctcgtgggaccaaattctatacttgtttccatgtggacacaaggtgtccacaggcttctcctggaggcttctcagcacccacctacttttagatcaagaccattattgctgacaggggacctttgtttcctctgtagccccttctgaaatcctatgcctttgcaacccaagaagctgggttaggctgggggcctcctgtgctgccagctggcctgggcagcggggacctgcgtctctgctcagaaactggggtggtgagatgggattagcaggcacgagccaagcctgtgtcctcggtggcaggccaggcagctggttcaccgcttacataaacggggccaggaagctgaacttgtttttgctggcaagagctgcggcaagctgcaagagagttgagaaatatgtgtctccgtgtgcgtgtttttctctggttattgacatttgcaagtttacttgaagagggggaaaaagtagaaaaacaacaaagctgtttggattcctggcacccaaacttaggtcccaactggggaggaaccccactttcccagagctgtgctgcagggtccccagaccaaagggtgtctgggccatggtgggggtcccagtgtccctgggagggggaatcctaggccaccggggcagggagatatgggcttgcttgttgggagttactaggacctaaactctctttcccttgaggaatgggaggcaagggaggttgtgggaattttccctcccctagagctctccagggagaaagaagcatttttctgagggcactgggatgatctggtcatcatccttctcccaaagccatcaactattaaataataaatccatagattcattatgtgttttcaagctgagtattgtttgcttcctgccctctgagagctaatgattgggcgccatgggatgctagaccgcaggagtgggggcctgtgggggatctacaggtcacagtctgaatcctcatttcacagagaaggccagtgggctctgccaggggcggtgacgtgcccatggctgcctgtgagtcatcacaagaccaggaatagaactcaggtcacctgacagcacagagctgtttcctctacaccaaggggcctcctgcttgtggagatgtactttattttattttatttatttatttatttatttatttattttcaagaaggagtctcgcccaggctggagtgcagtggtgcaatctcagctcactgcagccttcgactcactgcagcctctgcctcccggattcaagcgattctcatgcctcagcctcctgagtagctgggattacaggcacacaccaccaagcctggctaatttttgtatttttaatagagacagggtttcaccatgttggccaggctggtctcgaactcctgacctcaagtgatccacccgtctcagcctcccaaagtgctgagattacaggcgtgagccactgcaccctactgagatgtactttatattaaagaacaaatcaaggcagactgtacgtttgtgtcagcccaaccccacacaattaatagtcagtgattaaactgaccagaccagaccagacaccaacactgactgttgaggaggagcttgggggtttgttttcgggaggcaatactgcctccttttgtgatcttagtcccaggtgaggtgcttccttgtcctctctgcagaatcccattctttcttagcctgggctgaagctgctccctccctgtatgtgaccctggccttggcgcagtccttgggtgctcttcctccctcctgcctctgcgctgcttcatgatgcacaggagccaaggaggggcaggggacagtcggttttttctcagggagattggaagagaacagaaacaagaagcaatggaatgctcctgtcctggaggttggtggggcagtggggagaggtggggaagccattgagcctgcacatacttttgacaggcttggctcatgcctgccaaccccatcccaccgcctgggtttctgagcagggacatgggtccccactgcccaggccagctggcagcacaggatggcctccaacctaacccaggctcttgggttgcaaaggcatagcatttcagaaggggccacagaggaaccaaaagtccccctgcctgtggagtcaggcctgatctctttgagggtgctcacaccctccatgttcccctgtaggtcttccttccctccttactgcatttcagatactccagacaccagccctccccagaactctcactgttttttgtttttttgagacacagtcttgctctgggtcccaggctggagtgcagtggcacaatcacagctcacttcagacttgacctcctgggctcaagtgatccttctgccacagcctcccagatagctgggaccgcagacatgtgtcaccatgcccagctaattttagagttttttggtagagatggagttttgccgtgttgcccaggctggtctcagccacctgggcacaaacgatcctcccatctcagcctcccaatgtgctgggatgacaggcgtaagccacgatgcctggtgactctcaattctttttttttaaattattattattattattttggagatagagtttcacttttgtggcccaggctggagtgcaatggtgcaatctcagttcactgcaatctctgcctcctgggttcaagtgattctcctgcctcagcctcctgagtagctgggattacaggtgtgtgccaccacgcccggctaattttgtatttttagtatggggtttctccatgttggtcaggctgctctcaaactcccgacctcaggtgatctgcccgcctcggcctcccacagtgctgggattacaggcgtgagccacggcgcctggtgactcagttcttaatgccttgcatatactgttctctctttatggaatgtaactccctgtggctccacttatcaaacccccactcatttatcaaggccccaataaaatctctcttccccctttagaataattgatccctcttcttagttccctcagtatgttggagacatttatatcaggttggcctgtattacagatagttttaagttctagggctttgtggggtttaaagaagattacgatatggaaatgataggaaggagtgccagtgcattgtagatgctcagtagcttcaatatggagttttttttttcctggattaggaacttctgaacttgcacatcatgggtgcacaaaaattattgaattcttgaagaagggacaggcataggcttgcaatcctggctctgaatgctgagcaattgctcacggacaaatgctccgttgattgtgtgctctttgctaaatttcagtgtgtgcaccagccacgccttcgcccccgcgtgccccgtctcctagggcctactatgcaaggcctgtgtcaggccggggtgggagcatgagaatgactgggcatatctcccaggaccaggaaggactgctctcaggagccccctcctcacctggttcctcatcgtgtctcttccttttggcccttctctttggtagggcctacttagggagggccccagcagattcccagggaacagaaaaacagacagatgggaggaatcaaggctgagcccagggatggtgtcttgtgtccaccagggaatcaggcctacaggggagggctgggctatgggtgcagaattcagtgacagtgacagtgagagaactcagcagtgcaagggcaaagtggcactgtttggcctgaaggtgctcggaagctgcttgtattgaaaaatccaccctcatcccccgacatccctcagtgcccactgcgctctgccgtgccctctccctccttcctagaaatcctaactcacacagacccaggctatgtagcttgtttaattaaatatatatatatatatatatatatatatatatatatatatatatatgtattcattataagagcaatataggcaacttatagaaaattcaaaaactacagaaagacacagggaagagaaagaaatcacctctaacaccatcatttggagaggagggcagaggtagggagaggacacttctatgaatgttacttgttctgagagtcacccatgaggcttccccactgccacccagctgtcaggggtactgagtcagagatttgggtcaggaggcagagggctgagtgggtgggagggaaggggcggtgctgcccactctgactttagcaagtatgttttcttatagtctttatgagtatttctttgatcattctgcatacagtgcttttaaaagcgtagttaacacagtgttgttcgcaggttctagaggaaatatattttgaagcagggctgtgacaggcaatacttgccaatgggtggtttataattaatcattccctgttttaaaaaatagtgactcagttttaaagattcagaaagccattactcaagttccttggcagaggaagtggccattatgttgctccctgcagctctgcttttgtggaagagggaaaaaaaagtatttttatttggtatttctctgagctgctcagatactttggccattgttagtgagtgcaggagcagaacagcccctgctattgttcaggctggccgctaaacatggcaagagcttcccgctgaactggggtaggggaaatgaccagaaagacatttactggatttggcaaaggcagaagcagaaaagagagcttcctctggctccaggagtctatttcttgcctcagcgggctcctctgccccccagcctggggcctgcccatcacacaacacgagagggcaccacttagaccccttcacctgcaaaccgtgcgcctgggagtttttggtgccgagaccctgtccctgtgggcacccctaacatgccctatattcaacaaacatgcatgaagcacctactaagttctctgatgagtgacgaccaggagcttccagtgttgtcaccatggtcggggaagggacctttatatagttgaggactgtgccatgtgaaaagtgccagtgattggatgagctgcagtggtccttgacccctaccttagaccttcatgcatcctgcacttgtgtctgttgcatgccatgtgaattctgatttctgctaatcagcgaatcagctgaggaagggatattgcaagcattgcactgggagcagttctctttgggcactgtttccatctttgctcctgcaagtttgtcatttgtgcaggaacttgaaatccgtgttaggttttatcttgacagctgctttatccagtggaaaatggaaaagtggaaatattgatgcactgattagaagtgtcgttgcatcttccatacgtaaccgcattcaggcactgatggacttcaagatgtgggctggatgtggtaaactgctgcctccatcaggtgctcattggagttcaacgcactggaccgtgtgttcagttgtgatgtagcaggacaagccacagacaaaacccctcagacaccgagttaaagaaggaagggcttcattcggctgggagcttcagcaagactcatgcctccaacaaccgagctccccgagtgagcaattcctgtcccttttaagggctcacaactccaaaggggtccgcatgagagggttgtgattgattgagcaagcagggggtacgtgactgggggctgcatgcaccggtaattagaatggaatagaacaggacagggattttcacagtgcttttctatgcaatgtctataatctatagataacataaccgattaggtcaggggttgatctttaactatcaggcccagggtgtggcgccgggctgtctgcttgtggatttcatttctgccttttagtttttactacttctttctttggaggcagaaattgggcataagacaatatgaggggtggtctcctcccttagtgaaggaaaaggacacaggtcacacacgccaacaccagcagtttcattcttagggaagttcttgggcaagtgcactgagtcatgagaaagttgatagccaccctctttgatatggcaaaacaatgggaatgaccgcaaacctccctcagtgagagaatgatagggtcacacaacgaaatattacatagcagtgagactgaacgaactacgtgtcagtgaatcagagaaacatataaatgaggccgggccaggttgtcatccctctaatcccaacattttggaggcccaggtaggaggattgcttgaggccaagagtttgagaccagcctgggcaatatagtgaaacctcatctctcaaaaaaaaaaatatacagccagtcatggtagcatgtacctgtagtctcagctacttgggaagctgcggtgggaggatcagttgagcccaggaattagaagttgcagtgaaccatgattgtgccactgtacttcagcctgagtgacagagtgagaccctgtcccaagaaaaagaaaaaaaaaaaaagcagccgggcacagagcctcatgcctgtaatctcagcactttgggaggctaaggcaggaggatggcttgaggccgggagttgaagaccagcctgggcaatatattgagaacttgtctctagtaaaaattaaaaaattagccgggcatggtggtgtgcacctcccagttactcaggaggctaaggtgggaggatcgcttgagcccaggagtttgaggttgcaaaaagctatgattgtgccactgcactccagcctgggcagcagactgagaccctgtatcagacacacacacacacacacacacacacacacacatatacacacaaaggaagttcgagaaaagcaccagactgagaccctgtatcagacacacacacacacacacacacacacacacacatatatacacacaaaggaagttcgagaaaagcaccagctgggcgtggtggctcacgcctgtaatcccagcactttgggaggccgaggcgggtggatcacctgaggtcaggagttcaagaccagcctgactaatatggtgaaaccccatctctactaaaaatacaaaaaaaggaaaaaattagccgggcatggtggtgtgtgcctgtagtcccaactactcgggaggctgagacaggagaattgcttgaacccaggaggttgaggatgcagtgagccgagatcgcgccattgcactccagcctgggtgatagagcgagattctgtctcaaaaaaaaaaaaaaagaaagaaaagagaaaagcatatcacagcagaagactatattcaaaccatttatatgaagctcaaaaatgaagcaaagttaagaaaaatgtagggatgtatgggtagtgaaagttaggttggtgggctttcctgggtattttatgcttcataaattaacttttatgtatgtagcttttacatacattatatatatgaatttgcatgtattcagtattatgtaatacattaaaaacaatgttcgcaatgctaaaaatatattgttgaagattctgtgtgaaagctatactgtagttgtggctttttataaccctttcaagccctctgggcagtagcagtccaccccttattgccctcagtggacttcaccttctagggactcagaatttttttttttttttttgagacggagcttcgctctttttgcccaggctggagtgcagtggcgtgatctcggctcactgcaagctccgcctccctggttcaagcaattctcctgcctcagcctcccaagtagctgggattacaggagcctgccaccacgcccagcaaattttttgtatttttagtagagacagggtttcaccatgttggccaggatggtctcgatctcttgacttgtgatccgtctcgcctcggcctcccaaagtgctgggattacaggtgtgaggcccagctgggactcagattttgctgaggaccaggacagtactgtgtgctgtgtcctggccttgcagcagtgaatgtgtctcccgtttctcaagggcaggtctctgggatgcctgactgtgtcttccttgccagtgcctggctgctgcagcctcctcaaatgtttatcaaacacaggacttgcccaccgtgggagaaagtaaggccataggtgtctcaggaacctgcccaaactcgcctggctgcacggtgacaattcaaccagctttcttacccaaggtctgttggtgaccagagaaaaccttagatgaccggctgccatgatggccttatatctgtcccttttctgccagccttgaggtagagggtgccagggaggaggactctggctctaggtgttaaagtgagagggaagtgtgaagggtatctgtatagctagacagggctcaatgccaggcagagctgtctccgcccctttgatgtctatgtctctgtccctggactgtggccagtagccagtgtggactccaacctcaccagctttaggggtgttatctgcctgggagtcactgatccttactccctcctctgacagccaccttggatggggtgaaaggaaggacagcctgccaagtatgagataaaaacgcctcataaacaagaagggatttgcaggccaggcagagagccttgtgctgcttctgagtcccaggagcatgggcgaggaggtgaggtcaggcactcagcagctgctggtcctctctgaaatctttggccagatttattgctactgcttgctaataaatggttatgcatttggttcaaaggaccaagtgtgcttacatgaaaactggctgtgttccctggcctctgtttccttagctggttggactaatttgattggttaataaatgagtccaaggtggttgggctaatttttatcttagattctatgactctataactgctactcaaaaaaagtgtacttgttcctttaatctttaatcttatttttcttgagtagtagaatacacccaatttttttcaaggggtagagaatgcattttttttttaaccttccagtttggtccctagagtaaacacagcattgctgtagtagatgtagggtactggagggagcatggaacagggaaccagaagccctggttcctaccccagctgggcatctgggccagtctcttgattcctctgtgcctcagttaccaactatataacgggcattctgccatgaataccctgcgatttggaaacctcctgtgtacgtgtgcacttgggtgcctggcattcattcctaatggcatccattcgttcacacattcatccagtactcagcagactcctgccatgggccaggcaacgtcccgggcacttggaatataatggagaacaaagcagggtgcctacttctgtggtgcttggagtcttgaggggaagagagacacggaattcgtaattacatggcagcgtgtgggtgacgtattgcagaatgagggcctagtggagctgggggaccggaaacgatgtttaggccgagacctggaataggaggagttgtcgtggggatgatgtaggaagaacgagtgtgaggaggagagcgaggggagttgaggggagggctccacaccttctaaggagtggggagagatgaggcctccaaggacagaagggccctgcaggccacgctgaggagcttggacttcatcttgtggatggtggcaggcccttgaagggttttctaatccagggagtggggtggctggatcatggcttcagaaggctctcccaggcagctggatggtgaagaccaggttggggaggtcaccaggagaatgctgccctaatccaggcagaggtgacggtagcctgggccacttcatcattatcactgaggcctctcgtggcttcctcagaccagaacgaagcccccttcttcagtggctgtgggctcaccaagtgtcttctccctcctccagaggtggcgagaggcgtgctgaccagtctgccaggagacagcgtgactctgacctgcccgggggtagagccggaagacaatgccactgttcactgggtgctcaggaagccggctgcaggctcccaccccagcagatgggctggcatgggaaggaggctgctgctgaggtcggtgcagctccacgactctggaaactattcatgctaccgggccggccgcccagctgggactgtgcacttgctggtggatggtgagttgtgcctcagaggtcccggagatagttcccgtaagaaatgaggctttgtgcattccagacagtccctgtctgagccttcaaactcccaccatttccttggcgcaagaattttggggaaggcccaccaatgtctgccatccagatgctggcaaagactgctgctgggtgggagtgggagcgtctgactggtggggaacattggctttgggagttaggacttttggtgaactggtgaatagcctggggcccggagtcaggcagcctgggtttgaatcctgctccctcacatacagcttaacttctccacccttcagtttcatctttggcaaaataaggttaattttattaccttaccttagagttgttgcaaagggggtgtatgtgaatttgcgtatgtgtgtgtgtgtatatcacacacatatgctgctaaaaagtctgcatagcccatcctaagctctcaaattagctattcttatttttttagaattagcaagttcttagctccctcatacctagataaagacttcctggaaccagtgccctgtgtgtcgagccctatgccaaggcactttcttccttgtatctcttgtaatccttcagcagccttgtcagggaaagcaggcttatcatcatttccatcatcattacattatcatcagtttattttatacatgaggaaactgaagagcagctaggacttgcccaaggccgcacagccaggtctgtgtgactccaaagccctttttttcgatcatcctctctccccttcagacaagttggtcctgaggttcttcccttcccctgtcccggatccgtgtctcagactgaaaggaggactttggtgtcctttaatttcccagctgcgattccattcatgtgtggctgagtgtggccagggtcctgactagctccagggctggggccgaggggcccagccacgtgctcccctcaagggaggctgccctgtctgcgaggtcagtgcgccccaggatccccgcccgcctgctgacacctgcaatgctttcctttcagttccccccgaggagccccagctctcctgcttccggaagagccccctcagcaatgttgtttgtgagtggggtcctcggagcaccccatccctgacgacaaaggctgtgctcttggtgaggaagttgtaagtatcttgggctgagctatgtgcatgttggctccctccttcccgaggccccccagagaggggctggttcaggtgatttcaaaacattatcattaggaattaattccttcaggctgaggaagaggagatgagagggaactgagatttacatttgactgccccccctgagctaggcactgtgcttgtgcttggaaccttgtcctattcacttgaccttggttatcacaacagctatgggaagtgggctttatttttctcacttaacagatggagagactgaggcccagagactgattaacaggtttggttcacttagctagtaagtggctctgctgggaattcaatcccagtctgtctgatttcattcaaagtccgaagattatgggcgttgctctgaaaaacatgcaaatatccctgggagggggtgtagcacagccagaccattatcagtgtctgggcccttgtgggcgtatcaggctatttccatgataaagacacgagagagaaagcggtgatgggcgggggagagggagcttggggccgtggggggagaagtcacgcctgcctgggggctctgcatcatcaccggaagacggcttaacgtgggaagacctgggatgggttcaggcatggatgtagaggaggtggaagatgctgaaaacaaatctgcctctgcagttttgctggtctccatcccagagccacagtctcccttagtccagaggtttacaattgagtttgagctgtcagtcatcagaatatagggcaaggaggtcgcattccaagacccctagtggatgcctgaaatcgcaaatggtgctgaaccctatatatagtatgtttttctatagatatgtacttatgatagtttaatttataaattaggtgcagtaagaggttagcaataactaaaaatagcatagaacagtgataacaatatactgtaataacagttatgtgaatgtggtctctctgtttctcaaaatgtcttattactgtactcacccttcttgtgatgatatgaggttgtgaaatgcctgcatgatgggatgaagtgaggtgaatgatgtaggcattgtgactcagtgttaggctactagggctttctgaccatgtgttagaaggaggatcagctgttttgggtgactctgggtcaccgagccatgatgatggcggtggatgtcaggacgagtgatgggtagcatgcacagcgcaggaatgctgaacaaagtgatgattcatgtcctgggcgggacggtgtgaaatctcgtcacacttctcagaacagtgggcactttaaaatttctgaagtgattatttatggaatttcccatttaatatttttggaccgcagttgaccacaggtagccgaaatcttggaaagcaaaacctcagataaggcaggactactgtatcagaaagccagagcagtgacttcaatagggtggttcagctcccacttgggtctgtttccatagagttactgggctgcctggcagtcatgtttttgttctgtcctctatgatgaaaagtgcggattaccatctgtgaatgatgcagctgccattagcactgtcagctcatgccccaagcctggatagcttcacagcccagcaaaggatacaccttgtttgtacctcaaaggcttgtaccatagataggattagccaggatagagactgtggctggcagcttcccaggccagcctgtggaaagctctgtcatttctgacacttcaactgaaatacttttttttttttttttttgagatggagtttcgctctgtcgcccaggctggagtgcagtggtgggatctcggctcactgcaatctccgcctcccgggctcaagcgattctcctgcctcagcctcctgagtagctgggattacaggcgcacaccaccacgcctggctaatctttgtatttttagtagagatgaggtttcaccatgttagcggggctggtctcgaacttctgacctagggtgatccgcctgtctcggcctcccaaagtgctgggattacaggcgtgagccaccgcgcccggcttgactggaatactttccatgttgacagcgggagtgggagagagtacagtgcttgtcctcccgagcagcctcgtgcctttgcttccatctgctttgaagagtcagcatgaccactgggcgcctttgaagtgaggaaagagcaggggaagtggcttcgagagcctcaggggccccagcccccactgaggccccacccagacctcaggccactgcagggcctggaagagacaggcccctggaaagggattactgggagctctgctttttctcttgtgtgtctgctttcacacccttgcccaactgcagcactgctccctccttcttccacaggcaggggtgagctcagcctctgccttggaccaggcgcagtgctggggcagtgggaggaagcgggccaacaagactgagccccggccctctgaccccacctgggcacacacgtaaagcagtcggtgaccctgccttcgtggctgggtggaagcctgggtggtgttgggggaaggaggaaaggggctttaactcagcctggaaaggttgggtttgtcccatgtgctggattcagcaggagcccagggttcgaacccaagtcagaggtggcagactcgtcaccccagctggagggtgagtggttgacgtggcctcacatgcccacatgtgtcataagagggtgaagcctcaggtttccaggccaggtgggatggtggctgactcacctcgaatgtcttcagttacccagaattcttttctggactcacctgccagaacccctctagcactttttgtgtctctggagtggcatttctgctgggtgtctagtcatctgaggacagatcttttttgttagtgccttgaaggcagggtggggcctctcttgattcatttctatatcccctacagtgccaagagcacaggcccagcgggagaccagagctggccagccgaccattgcctgagtgactagctgagccctccagcctagctcccctcacccctcgtgccaggcgctaggctacatgtttatatatatttgtaaatccagctagtttcctcatctctagattttacatttattgctcaattttttttttttgagatggagtctctgtcgcccaggctggagtgcagtctctgtcactgcaacatctgcctcctgggttcaagtgattcttctgcttcagcctcctgagtaactgggactacaggcatgcgccaccacgccaggctaattttttattttattttttgtatttttagtagagacagggtttcaccatattggctaggctggtctcgaactcctgacctcatgatctgcctgcgttgccctcccaaagtgctagaattacaggcgtgagccaccgcgcccggccttatttctcagtcttaacagaaccagccacgtgtgattgttcatgcctgtaatcccagcactttgggaggctgaggcgggcagatcacctgaggtcagcagttcgagaccagcctgggcaacatggtgaaaccccatctctattaaaaatacaaaaatttgctgggcacgctcaggaggctgaggcaggagaatctcttgaacctgggagggaggcggaggttgcagtgagccgagactgcgccactgcactccagcctgggtgacacagtgagactctatcacaaaaacaaaacaaaacaaaaacttaacccctactaggtaagtagtattaatattcctattttcaaatgagaaaaggagacttagaggcacagggcttataagtctggagctgggattcaaaccccgggattccacttcccccttctgtcccgtcttgagtctgtgcgaaactgacaggcaagccctgcccttgttttgtgtctaacagtcagaacagtccggccgaagacttccaggagccgtgccagtattcccaggagtcccagaagttctcctgccagttagcagtcccggagggagacagctctttctacatagtgtccatgtgcgtcgccagtagtgtcgggagcaagttcagcaaaactcaaacctttcagggttgtggaatctgtacgtaagctctaaccccctctccagcagtttccttctcttttgatttaatactccttatcgacttctcagagtggcagggaaggggtggttgaggggtttggtgagttggtgccttttgggcgttgcttgccgggaggtgtggcaatgataaagcaggcccttgtggagctgtgcatggggagtgaacggggctgggtggggccctgcttgctgggatctcagcctacatgggcttctctacactatatttggtgctgcaaaggagtcatgctcacttttcccacagtgcagcctgatccgcctgccaacatcacagtcactgccgtggccagaaacccccgctggctcagtgtcacctggcaagacccccactcctggaactcatctttctacagactacggtttgagctcagatatcgggctgaacggtcaaagacattcacaacatggatggtaaatttatgttttacttctggtcagagaggcgcccctagatgcttaggcgtagtagaaagggtactagaggccaggcatggtggctcacgcctgtaatcccggccctttgggaggccaaggtgggcgaatcacttgaggtcaggagttcgagaccatcctggccaacatggtgaaataccgtctctactaaaattacaaaaaattagctgggtgtggtggcgcacgcctgtatcccagctattcgggggctgagacaggagaatcccttgaacctgggaggtggaggttgcggtgagcagagatcacaccactgcactccagcctgggcgacagagttagactccatgtcaaaaaaaaaaaaaaatagaaagggtactaaaaggaaaaccataggctctagttcctgcttcacaattggctaccttcgttgctttggataaatgttttaagctttctgagccttggtggtatatcatttattaaatgaaaaggataatgccaggccagtctcctcttcccgggcttgtctgtgaggagagcaatgtgggaagagatttgggctgtagacatgtcaagggttgtggcttgcaggattctatagtgcatgggtggggcagggactttctgcttcagcttccgtgggccctgagggcaaccccctctctagcagagcctctggggttgtgggagcctctagaggcctctgccagctgaagcacagggctggccaaggcaccaacccactggggtgctacctgcccagcaccatcctggatacctccccagagtcaccgtgcccccgccctcaggtcaaggacctccagcatcactgtgtcatccacgacgcctggagcggcctgaggcacgtggtgcagcttcgtgcccaggaggagttcgggcaaggcgagtggagcgagtggagcccggaggccatgggcacgccttggacaggtactgcggtgggcactgagaaaggaagggatgtttcaactgtcattgcatcaggtatccattgctatgtgacaagttgcctcaaaactagtggcttaggccaggtgtggtggctcacacctgtaatcccagcactttgggaggctgaggcgggtggattgcctgaggtcagcctggccaacatggtgaaaccctgtctctacgaaaaatacaaaaaattagctggacatggtggcaggtgcctgtaattccagctactcaggaggctgaggcaggagaatctcttgaacccaggaggcggaggttgcagtgagccgaaatcgcgccactgcactccagcctgggtgataagaacgaaactccgtctcaaaacaaacaactagtggcttaaaaacgaccatcatttatcggcttgaaatttcaaaaatacagtcagttaggcagctcttctgctggtcttgcctgaatcaggaatgcagctgccatcagattgggatggtctgagatggcctcagtcacatgtctgacgatggtgctggctggtggccgaggccctgggttctccctgtggcttctcatcctcagctgccagcccagactcagggcaggcgggtggggatcccaccacagctggagggatgcactgcagagaagttagccgtatttaatctagggctttttatttttttcaaatgttaaaggtagtaataattgccattggggattgttgaaattagagcatgaaaaattccagaaagatatgaagaataattatcaccagtacttttactccctagagaaaaccagtgagaacatgttagtatgctgctttcctttttctaggtacatgtatgtgtgtgtgtatttatatatataaatgtaatattccccatgttgtcaattacttttggaaacttattatttagtaactgcctgattaatacatatattttaaaactccatggaaatttgttgttgttgttgttgttttgtttgtttgttttgagacggagtctcactctgtcacccaggctggagtgcagtggcatgatcttggctcactgcaagctccgctttccaggttcatgccattctcctgcctcagcctgccgagcagccgggactacaggcacctgccaccacgcccagctaattttttctattttttagtagagacggggtttcaccgtgttagccaggatggtctcaatctcctgaccttgtgatccacccgcctcagcctcccaaagtgctgggattataggcatgagtcactgtgcccggtcggaaattttttttaacttaaatttttttttttttgaagacaggctttctcctcgttgcccaggatggagtacagcagtgcaatcacagctcacggcaacttctgcctcctgggttcaagcaatcctcccgcctcagcctcctaagtagctgggaccacaggcgtgtgccacaatgctaattttttaaaaatgttttgtagagacagggtttcaccatgctgcccaggctggtctcgaactcctggcctcaagtgatccaccagcctcagactcccaaagtgctgggattactggtgtgagccactgcacctgactaaactttaaatttttttttttagacggaatctcgctctgttgcccaggctggagtgcagtggcatgatattggctcactgcaagctctgcctcttgggttcacgctattctcctgcctcagcctcctgagtagctgggactacaggtgcacaccaccacgcccggctaatttttttttttttttagtagagacggggtttcactgtgttggccaggctggtcttgaactcctgacctcgtgatccacccgcctcgccctcccaaaatgctgggattacaggtgtgagccaccgcgcctggcctaaacttttaaaattttaatcaaattaatacatgcacatggcaaagaagtaataaacagcttataacactgagcagtggtcccttgtcccatgccttccatttctagtcctgctttctaaggaagctgcttgactctttctgtttctagttcctctgttggtgccctccttaactctaaacaacaagcttatatggcttttttttttccctgataaaaccacttgagacattatctatcaacaccctgctatgaaaggttaggatttagcagatctagaatgcaagaatctccctgaccacaacccagagagtggtcagccagcctctgcttaaatgcttccagagacagagagcttactaccccttgcagcaatctgttttattgttcccagtgtttttgttgtagaatggcttcatggctcactttggggtcaaatgtttctagccctgtggcgtagttgaaccaaattaatcattcttaaatacttggcagttaggaaaaaaaaaagaataagatacccatttatttgagtaagtatggataaaaaggaaaaggtagaattgacatcagtcccatcccgacccctgccactttctcccagccctggccccagggagagaaggcttttatctatgggctgcacattcttcccccagattggatggtgtggggtgatggctcttcctcctggctggctttgtactgtggggtccttgtcccttgtctttcctgtcctggggagagccagaggagtatgctggggcttagggtgtaatcctagttggatgcaataatatgaagtgccggcttccatctttgttggcactttccttgttcatcaaggacaggaggcagctttctattgggccctctcctcaaaagcttttttcctgctcagacctggacaaggagtggggcctaactactatatcttacttagggagaccattttaataaatcagtgcatccttcagggtagatcgtattgacctgtccatggttttctttgatttgtgtatactttgagccaaacacactcatttatctgaatgctgagcatcagtatggctttgggggcctttttaaggggggaaaaatcagctctaacatcgtgcagaggaataggaattccaaatataggctgatccctattttaccttttattccaaccacttagttcagatagtcacaagcagcttaaagcttgtgacaagcagcttaaaagcaatcttgcttttttataaagtttcttctaaaaattttcaaattgtaaaatgtacataagatttaccatttatattattattattattttttgagacggagtctcgctctgtcgcccaggctagagtgcagtggcgtgatctcagctcaatgcaacctctgcctcccgggttcaagcaattctcctatctcagcctcccgagtagctgggactacaggcacctgccaccatgactggctaatttttatatttttagtggagatggggtttcaccatattggtcaggctggtcttgaacccctgacctcaggtgattcacccacctcagcctcccaaagtgctgggattacaggcgtgagccaccgcgccctgcccatttatattatttttaagtgcacagctctgtggcattaagtattgttgtgcaaccatcaccactttacttctccaggacttttttcatcttgtaaaactgaaactcagaatctgttaaacagtaactttcctttcacccactccttcccccagctcgtggcaaccaccagtctacttgctttttctgtgagtttgactactctagtacttcatttgcttgcttgcttgcttgcatgcctgcctacctgcctgcctgccttcctttgtctctttctgtctctctctttttctctttttttttgagacggagtctcactctgtcacccacccaggctggagtgcactgtcgtgaccttggctcactgcaacctctgcctcccgggttcaagcaattctccagccttagcctcctgagtagctgagattacaggcgcctgccaccatgcctggctaatttttgtattttttgtagagacaaggtttcaccatgttgcccaggctgcactctaggtacttcaaataagtggaatcagagagtatttgtcctttggtgactgacttatttcacttagcataatgtcctcaaggtttattcatgtggtataacatgtgtcagactttcctccctttttaaggctgaataatattccattgtgtagagataccacattgtgttgattcattcatttgtcaggggacactgggtttgcttccccattttggttgtgcataatgctgctatgaacacgggtgtaaaatatctgtttagattcctgctttcagttcttttgtgtatatactcagaattataattgtggcattatatggtaattctatttttaaattttcatggaaatgccatgccgttttccacagtggctgcaccattttacacttacaccagagtgtataagggttccagtttctccacatccttgccaacatttgttatttttcattttgctgcaatagtcctccttatggatgtgaagtgttatctcactgtggttttgatttgcatttccctaatgattaatgtctttttttttttttttttttgagacagagtctcaccctgtcacccagtctggagtgcagtggggcgatcttggctcactgtaacctccacctcctggggttcaagtgattctcgtgcctcagcctcccgagtagttgagattggcatgcaccaccacacccagctaatttttgtatttttagcagagacggggctttgccatgttggcgaggctgctcttgaactcctgacctcaagtgatctgcccatctatgcctcccaaagtactgggattacaggcgtgagccaccacacccaggctgaggatcttttcatgtgcttcttggccattcatatatctttggagaaatatctattcaaatagaaagttctttcttatgtgaacctaactctggcctcactggcccttgctctgttctcagggataaccaatgacaaatttcctagtctgctctctctgaattcttttggagttcccagacctgcatctgcttgggctcctcttcccaggctgttacatgagatggtctgtgaattcttcacctttctggcccccttcccctgaatctggtctcatttgtggatgtccctctttaagttgctgacactctccttctattggaagatggtgtggtgggggctgtctggccagcactgggtacggtctccactttccagcctcaggtggatgtgcttctttggcatagacacagcttctgtgggagctcagatagaacagtcggtttcttctcatgtaaggagcggaagactttgagccctccaccctatgcatgtgtggtttgaggcaggggaagtcttcaaaacccagttgtgaatatatccaagaaagaaacctgctgctcccctctctgctgagggaagagcaagaggaacttggatgattttgacgcaagagggggattcaggttggaaattggcgggcagttctgaaaaataaggggaaggttagagcactaggtgaggtgtgtgttatggaccacggttatttggctgttagggacgcatcagtgtactaaacactgtatcaccgtgtggggtgagcttacccaccccaaggaccttcagctctcaaggcccagacagacaggatgcacctgcctcccagactaggtgtgggagtggtggcctttgggagacacagaggtcctgggaagcacctgggagtcaggttgtatgacactggtaaagttagttcagctctcagagcctcagtcttgtcatcggtaaagtagagatgatagcaccaatcttgttcctttcagagagtttttgtgagtctgatgaaaaaatattctttagaaatgctaaagcatactgcatttgtaaggggatcagcaattacaggacagtgctggttcttgggaggagagtgggaccaggggcatcccagaatcactatcctggatgccatcgtgaactcactgcattggaatctggaggaggaagtagagtgggtggtttgagaaagctttcctggtggttttagtatgtgcttgagggggctggaggagggtgcgtgccccactgtagtatgtctaatacgtaatagatggtgttcacagcacgataaggccgtaagcagactgttctgttggggcagtttagagatagcaggaaaagcttcatggaggaggtgacaattgaattatgtcttgaaggatgtgtaggagggtcccagacagaaaatggggattgtaggcagagtacaaaggcacggagctgtgagcaaggggagggtggcagagagctgcttggtgaggccgacacgtgtgtgggtgggtggtctgagtgggacaggtggaggccggccttggtgggcccctgtaggagtggaagtggaatgccatagagtggggctctggagcctggacttcagcaggtgctgcccccttgaggctggggcctggccccccgcacagactgtagcccaggatagccttttgtatgaagttgggggtcccagggtcactctgtcttagccctgctttggccagcaaggccagcacggtcggcagctttctctcaagcgggagttctgaatttatcctctcctgatgggagttctccctgtcacatcaacattgagtctgggggaatcacaaaatcattttcttcttttttttttttttcagagatggtatctcattctgttgcccaagccggagtgcagtggcataatcatagctcactccagccttgaactcctgcctcagcctctgagtagctaggactataggcatgcatcacgatgcccagctaattttttaaaaaatattttacagagatgaggtcaccctatgttgcacaggccttgagtgatcctcctgcctcagcctcccaaagctctgggatttatagccatgagccactgtgccaggctggagccccttttcaaagagggcgtggggcaaaatgcctgggaaaagcccattaggtataagggggttattccttgcttctcacaaataatccctttaactccctctcctattccccaagaatgggaatcacacctgttggaggaggtgataccaaaggtttgcatttgcacatgagggggtgccctgaagccaggactgggcggtcagtgcctccagctacacgttatcttctcaaactctttggccatccattctggaggagtttgttttgttcctctctgcagcactcccaagtgggacattctggggttaaagagccttggttacacatttccggagagattttgccctgttcacttatccatatggcatccctgaattccctctctgccctgttttctgcagctttctggaacattccactggggccccgcccacttccactgcatcacctgccactttgtgcagagcactggctctggagtcaggcagcattgggtctagttgctgcccttgcccttgactagcacgaccctggggaagtacctcactgagactcagtttgcttatttgtcaaatgggaataataatgcctgcctcaaaaaacccaaaccccagccttgctgggttgtgaggcttcagtgaggtgagaagcaattagcacagagcctggcacatgacaagggtgcaataaatgccagcatgactgcctttcacccgtatctcctgccaagcctgtctctcgagctttggattcatgtcttcaacttggcccagacttctggccagatcctccctcctgtgccaggtgctccgcatgacccaaaccaaacatatcacacccctcacagatctccctgccctgcttgtccaggggacaccccacccacccagctacccagccaggagcttgcacatcgcaccaaatgtctctgccttggtttgggttcttgccacatctcaatagcatctagcagtcagccattctgttgcactccactcttcgtgcccctctccacgaccctcctccctcatcctcgcattgcctatccgcctgacatccttgtgcacaactgggtgattcctaaacgttgggatttcacgggtctgtaaaatttcaaaaacaattctggggaccaattaaagttgctagctttttttttttttttttgaaacggagtttcgctcttgttgcctaggctggagtgcaatggcgtgatctcagctcaccgcaacctccacctcctgagttcaagcaattcccctgcatcagcctcctgagtagctgggattacaggcatgcgccatcatgcccggctaattttgtatttttagtagagacggggtttctccatgttggtcaggctggtcttaactcttgacctcaggtgatccacccacctcggcctcccaaagtgctgggattacaggcatgagccaccgtgcccggctggttgccagcttttaattttgctaagtaaggacataaaatgtaacaagtaagtgataaataactattagcatttaccatcaccataatttcataaaagaaaggatgcttggtcaggcgtggtggctcaggcctataatcccagcactttacgaggctgatgggggaggattgcctgagcccaggagatagagaccagccgggcaccataaggagaccctgtctttacaaaaaaaagttaaaaaaaaattagttgggcatagcagtgcacacctgtagtcctagctaagtgggaggctgaggtggaaggatcacctgagcccagcagttggaggctgcaatgagctatgattgcactactgcactccagcctgggcaacagagggagaccctgtcttaacaacaaaaagactccttaactgccccccacacccgccccccccaaatgaggaagggtgaaacctcaaaatgaggggcgcttttggcacccagacactgtggagatttgtacacacagccttttctgtacttgtctccactaggcttctctccacagaccatcccgggtggcatttgggacccagctggaggtgagtcatttctcctcaggaggctcctcagtgaggtttatttatttgtttctacacgaatagaggagcagtgatgagctgtctgttgggtggtttaaaggctgcgaggaaaggtgtgaagtagggtccccttgctcagcacgcaggagctgcctggcgccactgagcctgtgggtcccacggtctctcctcccctcttcctgtggctttgtggttcattaccactttaaccccagaaacctgagccgccagaggttattgggcattctctgggccacaggctgtgttgggggtcaggactgagagtagaaactttcttcctgaagcatctgtcttgagtatagtatggggagcctttaaaaaaccctaatgacagctgggcgcggtggctcacacctgtaatctcagtactttgggaggctgaggcgggcggatcaccaggtcaggagatcaagaccatcctggctaacacggtgaaaccccgtctctactaaaaatacaaaaaattaggcgggtgtggtggtgggcgcctgtagtcccagctactcaggaggctgaggcaggagaatggcttgaacccaggaggcggagcttgcagtgagctgagtttgcgccacagcactccagcccaggcgacagagcgagactcggtctcaaaaaaaaaaaaagccctaatgactgggtcccatttccatggttctgaggcaacaagcaaggtggagccttcaaggctccagacgaagctgactctggcggggtttggaaaactgctgaactgcacgagcatccatgggcagccatattttctatttagggctgccccatcttcttcttgttttcttcttttttttttagagatgaggtctcactatgttacccaggctggtttcaaactcctggcctcatgggattctccagcctcagtctcccaaagtgctgggattacaggtgtgagtccggcctgcccccatcttctttgtcttctgattttagctttcattctagtgcctccatgccctcaggtcatcctttagataccctgggctataagtgtgtaactgtcctctgctgggctgggaagaacgcaaaggaacaataaactgggtccctcccatgaattctaggttcaattcaggtcgcacttgctgtgcggccttgaacaagtcgctttccctctccgggcctctgtttcccctctgtacaattggaagagtggatgcattcttatacttcctctggtgctgctggtgtgtggtttcccccttactggtgatggcatactccaggaattctggaaaccctccctgacgccgaagcagggtcaccctctccccgcctccttgctagtccttactcctggcccagcgaggctcgtgatttttgtttaaaccattctgtggaattttagaattcttgatggaaaaatgatgagctgacaagaaaatgttttgaaatccagagcattccactcactgcctgttacggttaaggcccaggctttcgcttggatacttagcctcctcttgccttggggtttccgcagaaacactgttcccgtgcagggggagggagccgtgagggtgcctggtccacatccctgctgctgcaatgtgtactaaacccatacaggcaaatgaatatttatttgttatatattttttattgcaaaaaggtgcatagaaggaaattgaaatagtgcttatctctggtgatgtgtatctttccattttcttcttcctgtgtgcaaatatatagtattatgatatatactgtgttacacaataatcataaaaatatatttctttagaaagtttgaatcaaaatacatagaatttttcttgtcttgcattcttcatacagcattatgtcatgtcttcaatgtttttctaaaatatttttggccagacgtggtggcacacgcctgtagtcccagatacttgggaagctgagatgggaggatcactgaagcccagaagttaaagctacagtgagccatcatcatgccactgcactccagcctggcgacggagcgagaccctgtctcaaaaaatatataataattggccaggcacggtagctcatgcctgtaatcctagcactttgggaggccaaagcggatagatcacctgaggtcaggagttcaagaccagcctggccaatatggtgaaaccctgtctctactaaaaatacaaaaattagctgggtgtggtggtgggcgcctataatcccaactacttgggaggctgaggaagaagaatcgcttgaacccagtaggtggaggttgcagtgagccgagattatgccacttcactccagcctgggcaaaagagtgaaactccatctcaaaaaaaaaaaaaaaaatatatatatatatatatatatacacacacacacacacacacacacacatatatatatacacacatacatatatatacacatacatatatatacacatacacatatatatatatacacatacatatatatatataaaataaattttaaaagtttctgcattatgtagttatgtcataatttctacagctagtcccttacggttggatatttggttatttccagcatgctgttttttgttttgttttgttttgttttgttttgttttgttttgtttttgagacggagttttgctcttattgcccatgctggagtgcaatggcatgatctcggctcactgcaacctccgcctcccgggttcaaacgattctcctgcctcagcctcccgagtagctgggattacaggcatgtgccagcacacccagctaattttgtatttttagtagagacagggtttctccatgttggtcagggtggtctcgaactcctaacctcaggtgatctacccatcctcccaaagtgctgggatgacagacgtgagccaccgcgcccagcccatgctgttcttttaaataacattgagatgaactttttttttctgatgctgaagcccctgagacaggactccagggcccatgaatcactaataatgagcctttcttctgtccgcagaatccaggagtcctccagctgagaacgaggtgtccacccccatgcaggtgagctcctgttcttgtaaaagggtcagggctgcagcacctcgtgtttaggagtgtgggctgatgccagaccgaatttggtttaaatccagttctgtcactagtagaaatgtggtcgtggtgagttacctgtgcttttcaaacctctgtgaaagggaatcatagaaattatcttgtcccaggactgtaaggagtggagcagcgctggcctggcgtgcagaactgctctgcgtctagcagctgctatttcatctctgagctttttggacaacgctaatggcttagcttgagattggattctgtttatctgcatccttcccctgtggactcttggtgacataatttgctggaaagaggattacctctgaagctgcttaacaaattccttgagtaatccaatttcctatccaactatatctcctcctgtggcccttaattccctaaatgctaagctgggagtcatagccacttctggagctgtgcggcacagggaaggagcctggggctcttgaaccttatctgtgttccatgtaggaacagctgcaggtgaagcccatacccatggggctagagtgctcccaacacgggttctggggaaactgacaccgactgaggactggccacatcctgctaaactgtgagccttgcatttgctgtttcattggctccttatgttaacattgcaagggagtgcttgtaagggctttttttttttttttttttttttttttttgagacggagtctcgctctgtcgcccaggtgggactgcggactgcagtggcgcaatcttggctcactgcaagctccgtttcccgggttcacgccattctcctgcctcaacctcccgagtagctgggactacaggcgcccgcgaccgcgcctggctaattttttttgtatttttagtagagacggggtttcaccttgttagccaggatggtctcgatctcctgacctcatgatccacccgcctcggcctcccaaagtgctgggattacaggcgtgagccaccgcgcccggccttgtagggcttcttaacgtgagttaagtctgaggccagggccgggcacaggggctcacacctgtaatcccagcactttgggaggctgaggcaggcagatcacctgaggtcaggagttcaagaccatcctgaccaacatggagaaaccctttctctactgaaatacaaaattagctgggtgtggtggcgcatgcctgtaatcccagctatttgataggctgaggcaggagaatcgcttgaacctgggaggcggaggttgcagtgagccgagatcatgccattgcactccagcttgggcaacaagagtgaaactccatttcacaaaaaaacaaacaaaaaaaaagaagtctgtccaaggtgacatagctcgtaagtggtggaaccagcattccagtcatggtagtacctgcatccttgcatcggacctgtaaggacaacagctgcttcagtgtatccactgagcatcttctctgtgcagctttaagcttttggtggagaggcaggtggaaagaaagccccacctttagcaggcatggtgtggatagaaaaaatgcaaataatagtattattgatttttccactgttatgaatgaaatggagaaaggaatgctttgggtggatcagggagggctctgaggaggaggtaactcctgaactggttctgaatgatggtgcaatctgcagaaacaggctgatggtgaggaatgtctcttttaggcacttactactaataaagacgatgataatattctcttcagagattctgcaaatgcgacaagcctcccaggtaaggactgggtattttcatattcccagggtccgagggacagaagatttgtctctgcagaaagtcctttcttatttggacatgtcgtcagaggatcaatcacagatcaatcgcagaaatgttctgtgtgtgtgtgtgtgtgtgtgtgtgtgtgtgtgtgtgtgtgtgtgtgttggagagagtcttgctcggttgcccaggctggagtgccgtggcatgatctcggctcaccacaacctctgtctcctgagttcaagcgattctcctgcctcagcctcccaagtagctgggattacaggcgcatgccaccatgcccagctaatttttgtatttttactagagacagggtttcactatgttggccaggctggtcttgaactcctgacgttgtgatccacccacctcggcctcccaaagtgctgacattacaggcatgagccaccgtgcctggccagaaatgttcttttattactttatatgttgaactttgatattgttagctaagatataatgaggagaccgtaagaaaagtgggacaaatcacttcgagatatttgaaaagtgagatatttcacagttggcccacaatacaaatgaatgtgctgcaaacaagattattggagtctgaaatggaatacctgttgagggaaatctttattttgggagcccttgatttcaatgcttttgattccctatccctgcaagaccaggaaagcttaccagtatttgaatcaagaaagatcacaagtcctgtgtttgactaggtatatgggacttatggaatccagactccagaggttcagtagttgagcagctcccctgatgactcttgggcttcgtgaggcagtccttgccctcgttccccatccctgggtggattcctgcctgcactgatgctggctgcctctgctacaacagcccaggtacaaagccctaccatggtgcagtgcacctgtggaggacctgctaaatacctggggctgagctctgcacagttggggactcggagaggattagagccatccctgttctcaaggaggctacagtccaggctctgacaaagagtaaattggtaactgtgacaaagaccagcatgtgagatgggccaaaagggaggcacagataaagcaaagtggaatttagagatttgaaagagtatatcaagctgagcagtcacagaaagctcatggaggaagtgccatttgaaatgggctttgaatggtatgggtgggatgcaagaggttgggtgttcaaaggttgctatgggccgggcgcggtggcttacgcctgtaatcccagcactttgggaggccgaggtaggagaatcacctgaggtcaggagttcaagactagcctggccaacatggtgaaaccccatctctactaaaaatacaaaaattagccaggcgtgatggcaggtgcctataatcccagctacttgggaggctgaggcaagagaatcacttgaacctgggaggcagaggttgcagtgagctgagatcgagccactgcactctagcctgggccacagagtgagattccatgtcaaaaaaacaaaacaacaacaacaaaaacaaaagctgctatggaggaggggaacctccagtcctcttcgtccaccctcactgatgattttttttcttttttttgagacggagtctcgtcaagcgattctcctgcctcagcctcccgagtagctgagattacaggcatgcaccaccacgcctggctaattttgtatttttagtagaaacggggtttctccatgttagtcaggctggactcgaactccccacctcaggtgatctgcctgcctcggtctcccaaagtgctgggattacaggtgtgagccaccgcgcctggccagcattctcaaatttaacatgtctaaaagagaacacctgacgcctccccacctattcaacccagatctgttcttctccatcttccctatctcagtaactggtaccgcatttgctcaggtgcgggggatcgggcaggcttcctccctactcctcatcctgtgtccagtccctcagcaagcgttgtccttgtgctttgagacgtatctaggaattgaccactcctcaccatctccagtgccaacacccagtccagcccctgccgcctctcatccagcagggcttcctgggctgccaactggtctaccaacttctagtcttaacccccaaccaactcttttccaaccagcacttagagtatcccttaaaacacaaatccaagctctctctggctcagtaccatctcccccagagtaaaagtcaaagtcttgacaaagtccccagtttctacgaggagtcccagcaaagccatgtggtcccctatctttagacgttgcctctccattctccctttcctcgctctgccccagccacactgccctccttgctcctccacacatgctctacctcagggcctttgcacttgctgtgtgctctgcctggacacgcttcctctgacattcactttgccagctccttcctattactcaagtctctgctcagatgcacccttctccgggaggcttttcctgataatttttttaaaaaacatttgtttggccgggcgcggtggctcacgcctgtaatcccagcactttgggagccgaggcaggtggatcacgaggtcaggagatcaggaccatcctggctaacacggtgaaaccccgtctctactaaaaatacaaaaaattagccgggtgtggtggcgggtgcctgtagtcccagctcctcgggaggctgaggcaggagaatagggtgaacccgggaggcggaggttgcagtgagccgagacagcgccactgagcaagactccgtctcaaaaaaaaaaaaaattcatttgtctgtctcccttgattggatgtaagatccatttagatacatgataggcactcaaagaatatttgttggatgaaagaaggaacaaatatatggccaggcgccgtggctcatgcctgtaatcccagcactttgggaggccgaggtgggcggatcacctaaggtcaggagttggagaccagcttgggcaacatggcaaaacctcatctctacaaaaaatacaaaaattagccgggcatggtggcatgtgcctattgtcccaggtacttgggaggctgaggtaggagaattgcttgaacccgggaggcggaggctgcagtgagcggagatcacaccactgcactccagcctgggtgacaagagcgagactccatttcaaaaaaaaagaaggaacaaatagaaaagatgatgaaatgttaataaatgagcaagccaagcatactgctttcattacacagctgcatctctcaagagacatgggacatgcttggagaaacttgtctttgcagccagcgcccgctcaccagtctgggctctctgcgctgcctgactctagtaggcatctgaagtgatggctggcaggcagcctcttcgtcagcagtggattgcattttgggtagaagagcctgaatgctgggtccatacaactgtgactgcattcccagcagaaggagatggttttgtttagatgtgccctctgtctagtccagggactctggcagtggtaggaagagcctttctgtgggaagacatggctgcttgcaaagctggtttgttctttccttcattcaaagaaatattttggcgatcctactttgtattcggcactgtgtaagctgctggcagtgttacagtgaaaaagacacatgtggtccctgccttcagggaactcagtctagaggtggaaatggagaaatactgggaggggcacttgctcagcttggagtggggtcaattctcaaaggaaatgacatcacctcatctgagatccaaaggccaagtagggactagaccacaaaagggtgcagcaaaggtagagaaaacagacaggagagaagagggaacgtgtgtggagagccctggaggaaaaagatcatggcttgttggagaactgaatgaagttcatatggctggggcttgagtaccaaatgcagggacaggcaagagatgacacccccatggagaaaactgcttccaaacacttgatttaaagcatccaatcctctctgacattgtcctcaaaggaactgccatcaaggaggtccccaaagccttccgtttgttgtaccctctttgtgccttgtgggagcaggtggaatgtcaccagaaaagccactctgaaagtgagtaggagtctgtggctagccacaggcgctcagaaaccctgagcttgaggtgtctctcttgccaagtggtggaatcctggaatctagagtgggctttgttaagaaacaaacaaacaaacaaacaaaaaacagttaagcttgtcaaatggcctgttggttggcagagctgtttcattttctgggaggggggttggaggggaaggttcctttgaggcttttgacagcaccagctaagtggttttcttctcctcctattcctttttctccatattctcctcttcctcctctatcttcaattttttttttaacctagtgcaagattcttcttcagtaccactgcccacattcctggttgctggagggagcctggccttcggaacgctcctctgcattgccattgttctgaggtgagatgggtcccaggggatggccctgtggtgttctcatatttcttatctagctttcctttgcccattctgaaatttatggtgcatttattcattcatttatccattcatcaaatgaatgcacacaccacaacacacacaacacctactattatgccaagccgtgttttaggtgctgcaggagacaatgctgggcaggacagatacagtctcaggaagaagtcagacacgaagaggtaatcactactgtggtaagagctacaaaaagcatgccatggtgaggagaactgacctggcattaaggaggaagaggaattggtctgagaaagaagagggttctttttttttgagtcagcatctcactctgtcacccaggctggagtgctgtggtgcaatctcgcctcacaggacaacctctgcctcctaggttcaagtgatcctcccacctcagcctctggaatagctgggactgcaggtgcacaccaccctgcctagctaatttttctattttttgttgagatgaggtttcatgttgcccaggctggtctcaaactcccagggtcaagtgatccgcctgccttggcctcccaatgtgttgggattacaggtgtgaactaccatgcccggcccaaagagggttcttaggagagaagcccagcatgtaatatggttgacagcgtgtgcatgcacgtgtctgtgaagggggcgcagcacggttggggcaatatggggcaggaagagtggacaggtaggctggcaccaggtcataaaaggccttgaaagaggtgggaggattttaggccttctcttgaggctaaggagtgtctgttggagtttttttctttttctttttctttctctttcttttcttttcttttttttttttttttgagacagagtcttgctctgtcgcccaggctggagtgcagtggtgcgatctcagctcactgcaaccccaccttctgggttcacaccattctcctgcctcagcctcctgagtagctgggaccacaggtgcccgctaccatgcccggctaatattttgtgtttttagtagagacagggtttcaccgtgtcagccaggatggtctcgatctcctgacctcgtgatccgcctgcctcagcctcccaaagtgctgggattacaggcgtgagccaccgcgcccagcctgtggagttttaagaagaacctgggccaggcgctgtggctcacgcttgtaattccatcactttgggaggctgaggcaggtggatcacctgaggtcaggagttcgagaccagcctggccaaaatgataaaaccctgtctctactaaaaatacaaaaatttgctgggcatggtagtgcttgactgtaatcccagctactcgggaaactgaggcaggagaatcacttgaacctgggaagcggaggttgcagtgagccaagattgcgccactgcaatccagcctgggtgacagaatgagactcatctcaaacaaagaaaaccaaaaagtcactctcaatgcagtttggagactggatggggtgagtgaaaatggatgcagtagcccagggtctgggcaagagataataataaactgttttaggatggtggcaatgggttggagagccatgaatagattcttttttttttttttttgagatggagtttcgcttttgttgcccaggctggagtgcagtggtgcaatctcagctcactgcaacttccgcctcccgggttcaagcgattcttgtgcctcagcctcctgagtagctgggattgcaggtgaatgtcactacgcccggctaattttttgtattttcagtagaaatgggatttcatcatgttggccaggctggtcttgatctcctgacctcagatgatccgcccgcctccgcctcccaaagtgctgggattacaggcgtgagccactgcacccggcctcaagatatattttagaggtagaattgacaaggcttgacaacagattagatgaggaggatgaaggagagggaggagtccgggatgaccctcccatttctggcttcagcagttgggcagatgatactgtcattcactaagactggaaacacctgaggatagacaagtctcagtgaaaagtggtgattccactttgggacccacttgagtttgagatgccccgagaacctcaagcggacacgcttggcaggcaacacagatcgtcaccagcaagtagatggcaataagagtcattgggtgggggttggggatagggctgaaccctgtggggatccaaggtgaaaagttctgtagagaaggaagtgttgggaaaggggctgagaggaaccacaagattctggtgttgtaagaacgagagggagggagtgtgcattagacactgaagaaacacagtaggtgttggaattacaacatgaatatgacctttcctcccttccgagaaccacatactcaaatgatgaaaataccatgtgaaggtattttcatggtagctaacgcctgtaatcccaacactttgggaggccgaggcaggtggatcacttcatgtcaggagttcaagaccagcctgaccaacatggtgaaactccgtctctactaaaaacacaaaaattagctgggcatagtggcacatgcctgtaatctcagctacttgggaggctgaagcaggagaattgcttgaacccaggaggcagaggttgcagtgagccaagattgcaccactgcactccagcctggacaacagagcaagactccgtctcaaaaaaaaaaaaaaaaaaaaaagaaaagaaaagaagaaagaaagtaacattggagaagcaccacacagttaaatccaaggcgcccaagcaggacctccttaggaatattccatgtatcaatccaggaacttaaaggtcacctttaaatgctctgccctagtgttcttttccagccatggttaggaaatactcattcaggctgagttgcaccctggctgctgtctcatcatgcccatttcatcccaatcatcttcgctccatttggtcattggttttgtcattcatttccaagtctgcagaaaagtcagccaatagtgccttcagtgaacaagcaataatgaaatttttcggtgttcacaattttactgcaggaaccggctttttttcataagctgaaaccctaaaagatgtcaggctgggtcttctaggcagtggttaatcgcgatgatctacaagtggaggagacattgcactctgtcctttctacatgtagagagctttctacacgttagctcatcagaccctgccagtagccctgacctagcttgactaccaagtgtggtgtgggttgaaagattagcaagatgactactcaaattgggttcagggttgttttcactttttttctttttctttttctttttcttttctttttttttttttgagacggagtctcgctttgtcgcccaggctggagtgcagtggcgcgatcttggctcactgcaacctccgcctcccgggttcacgccattctcccgcctcagcctcccgagtaggtgggactacaggcgcccaccaccacgcctggctaattttttgtatttttttttagtagagacggggtttcaccgtgttagccaggatggtttcgatctcctgacctcgtgatccacccgccttggcctcccaaagtgctgggattacaggcgtgagccaccgtgcccggccttcactttgctttttcaatgaagtagattacaagccgtctgaagggtgcgtggaagataagattcttaatgagtagaggtagctccttggaggatgcaaagcctgttatattttttggccagtgaggggccatgtcagcatccacgggttcacctcctgcctaccaaaggattccttgcctcaccctaggtataccctcctgtgttctggctctgtgtctacgttagggcttcaacagacttttctcataacccaccacaggccctatagagtagagtagatatgatatacatttgacgggaggaaactgaagctaaaagagatggtgcgataacagctagtaagaataggccaggcgcggtggctcacgcctgtgatcccagcactttgggaggccaaggcaagtggatcacctgaggtcaggagttcgagaccagcctggccaacgtggagaaaccctgtctctactaaaaatacaaaaattagctgggcatggtggtgcacacctgtaatcccagctacttgggaggctgaggtaggagaatcgcttgaacccgggaggcagaggttgcagtgagccgagatcgcgccactgcactccagcctgggcagcagaaggagactccatctcaaaaaaaaaaaaaagatgaagaagaaggccaagaatcaaaccaaaaactcctgctatttctatagggccttaagggtcatctagtcaaactctttcattttataaatgaggaaacagcccccaaaggtaaaatgacttgcccaaggacaagcaagaacacacaccctgagagtccctgcccatggtccccacctgctattggctaagagctgggcccagctggtcccattggcccaccactggcccttaacatgcagcaccatcttggtgtgttgtaatggctaatagaggagcattaggttgggaacagacctggtttgctattctgctgatgatgcttggacactggctggttgctaaacaaccagagtccctgcaggcacagacagggccagtgccctgtgctgagaacatgccaggaatttattttctagcctagtgagtttccattttcttctgtataaggcaaatttgtttggaaagaggccagttatttcaagtgatgaagaagccttctattccccaaatcccctctgtctagcaaagagtataaacttagaaatactgtggggctctgggctgccaaaatggctgaaccatggttaccatgggatggccacatttacagtaggtgaagtgtgagaggttgacttcatcctgccagtctatactatatttttttgtatggccctaaatctttttccagcaatatcagtgatttttttctttgttttttattactcattctttttttctgaatcatagatgattttttaaaatttaaatatgctatcgaaaaggcttgccatcttacaggggccaattcctcccaccctattctctgtcccccactgattctctgtattttaggttatcaggcactgggaaaatagaattctcctagtagagaattatttttctgcatatttatctagaatgagcttacatcattaagtgaggacttcctatgtgtatgcctatgacttaaacatcatttcgttttgaatgtagtgtatcattccggtattttaaaatcagagcttttgctacctccacagctgggggacgggcagagggactttcatggtgttccgggccatggaggtggctgggtgcagtgggcactgtctgtggcctttggggtaaaaggggtggcaacttggtttctacatatctttctaaaaaagagtgagagttttgagcattttaaaaaacttcttttagctacagaatcttttctttaaatgaaactttttgaagcccaaatatgtaaaatagataaaaggtggaggtcaaggtgcaaaagaaggcagcagagagctcatctgtttcttctttctgcccaccctgtgtcctctccagcccccaggccctgctcacacccatccaggccagctctggacaccctcaggttggctggtttcaaagtcctctttgagtttagtgattttcagaaaagaattcatactcgccttagaatatttcaaaaggaaagctcacgtttctttgttacccattcagttacttcgaaaaaaaactgaggacagagattgcttccatattaggtcaacagggacttgaaaaatatatacatacacacatacatatgtatgtgatatgtgattattactggtgatttgctaaataatgacaaatggaaaaaaatatatgtcatccaaagagagccactgttaattttcaaaatgtaaatgtgattgaagtctaacaaacatacagaaaagttcccacatcatgtgtacagcgccatgaagtgtacacacccatgtcattataatgagatgcacgtggcaagtcaagatgccaagacaccaggttgcagcagagaaagaggtttaatcagagggtcaccaaaggaggagatgggaggaaacctctgtagggtccagccgtacggagcttagcgggtgttctccccgtgtgtggagacgagagattgtaataaataaagacacaagacaaagagataaagagaaagcacctgggcctgcgggaccactactatcaagatacagagactggtagtggccccgaacgtctgggctcgctgatattttttgcatacaagacgaggaggcagggtaaggaaggtaaatcttctaagtgattgacaaggtgaagcaagtcatgtgattacaggatcgggggcccttcccttttaggtagctgaagcagagagcaggcagcatatgtcagggttttcttctctgcacttataagaaagatcaaagacttttaagactttcactatttcttctactgctatctactatgagcttcgaagaggaaccaggagtgcgggaggagcatgaaagtggacaaggagcatgacccttgaagcacagcaccacagggaggggtttaggcctctggatgactgcgggcaggcctggataatatccagccttccacaagaagctggtggaggacagtgttccctgactcctccaaggaaaggagactcccttttgccggtctgctaagtaacaggtgccttcccagacactggcgttactgcttgaccaaggagcgctccagcggcccttatgccggcatgacagagggttcacctcttgccttctaggtcacttctcccaatgtcccttcagcacctgaccctatacccgccggttattcctaggttatattagtaatggaacaaagagtaatattaaaagctaatgattaataatgtttataataatgattgataattgttcatgatcatctctgtatctaatttgtattatgactattcttattctattttctttattatactgaaacagtttgtgccttcagtgtcttgcctcggcacctaggtaatcctctgcccacacctcaaatccatctccccaaggaatttggggctagggttgtaaaaatgttggactgggccaaagtgtggagatggttgactggttgcagggtgtagggtgaggtcctgggacaaggagatgaagaagctgtcttctcatgccaatcccgttcctctgtgagggtcttcaaactggttgccggaattaggggtccgtaaaacatcttaagtgatccttaaacaaaagtcttaggatcctaatgtcagaaatcctatctacagaaacaacggggatgcagatggtcagtgtctagggctacgtgactttttgcaataaggaaatgggccaaagtgcagcctgattactgcttcattataactattaatatatttctgtccagaacccagcatgcaatttttgtcaaccctgtggagatggttttacaatcaacacccagatcaagaacacttaatatttagacaaatctcctgagtctttttcctctgcctagtttcttgtttgtttttacacagccatgattattctgtatcctcagctctgcatcctgcctttcacacttagcactataacacaggcattctttcacattagtacaaattcttgtaaatctcagacttttttttttttttttgagacggagtttcattcttattgcccaggctggaatgcaatggtgcgatctcagctcactgcagcctccgcctcctgggttcaagcagttctcctgcctcggtctcctgagtagctgggattacaggcgcctgctaccatgcctggctaatttttgtattttttaatagaggtggggtttcacaatgttggtcaggctggtctcgaactcctgacctcgttatctgcccgcctaggcctcccaaagtgctgggattacaggcgtgagccaccgtgcctggccataaatctcactttcattagctgtagtattaggtggatataccaatttctcttaatcaacctcctattactcctaattggtggcacccaaacattaccaattatttgggtgttattttgcttttatttaattaattaattaatttatttatttattgagacacatcactctgtcacccaggctggagtgcagtggcataatctcagcacactgcaacctctgcttcctgggttcaagcaattctcctgcgtcagcctcccaagtagctgggattacaggcatgcgccacgacacccggctaattcttttttagtagagacagggttttgccacattggccaggctggtcttgaactcctgacctcaagtaatccacccaccttggcctcccaaagtgctgggattacaggcatgagccaccacacccggccttattttgcttttataaaaaacactgtgttgaacatctttgtgcataaagggtttttttttttttatagctatgttctttcttttcccagaagtagaattcctgggtcagagagtctgaattctttgaaatccagagtgtaatgattctctcctcagtcctttcttacaggagaactccattcaatgactcagcatagctccagtcagcagccctgctgggctctcttcctgtgtggtgtccacatggtgaagccctaaataatattctgcagattgtttatttcatttggataccaagctaaaagccagtggcagatttggagccaactattaattatttatcataacaaggacaggaataacctgtcgatataaaaagaaacccaaggaaaatccccaaatcttgtttttgacattggtttcccctcctctttcccagcccttcctggagtaactgatcttccatggaattgagggaggccaccttgttcccactttggggttaggaggcatgtcagtcacaaagtgggaagcaagagggaggggctgaggcttggggcactggccaccctggcacagttgaagggcccctttaggaaggggacgtgactgtgtttttgaagatccatgtcaccatttcatctttctttgagctgtcaagtgacttttctcagttactgagccctggctttgggcccagagtggagcactgtgaaccaagctgtgatcagaaagatgtctatctccttcctgtgtagcattgactttcctgtcagatgagtcaaattgtgcccagtggtgcccacagttgagtctgtgggaagtcaccagcatggtgggagtggaccgagaggcgtagggagaactggggaggtcagcaacattaggagcaagaggaacaggaaggcagttgagggagcagtgggacccttttcctgctattacatggcggttgcaaattatctgcctcctgccagccttactttgaccgagaggcccattttctttccctactaaaagaatgctttctttttttattttctttccttttcttttttttttttttgagacagagtttcactcttgttgcccaggctgaagtgcaatggcacgatctcagctcactgcaacctctgcctcccgtgttcaagcgattctcctgcctcagcctcccaagtatctgggattacaggtgcctgccactacgcctggctaatttttgtatttttagtagagacggggtttcaccacgttggccaggctggtcttgaactcctgacctcaggtgatccgcccgcctcggcctcccaatgtgtggggattacaggcgtgagccaccgcgcccagcctatttttcttttttttaagtaaatggatttgggactgatgatgtgtacctaatgaacagcctctgcaatgggacaattaagggactgttaagtgactttttggtgcctcagtttcttcacttgtaaattggaccaacaatacacatctatttccttgggagtgttttggaaactcaccaactcttcagagtatggtgaactccctggtgataaaaacagtcgggtcgggtgtgccggctcatacctgtaatcccagcactttgggaggccgaggcgggcggattgctcgagcccaggaattcaagaccagcctgagcaacatggcaaaaccctgtctctatgagaaatacaaaaatcagtcggatgtagtggcacacacctgtagccccagctactcaggaggctgaggtggaagaatcacctgagcccaaggaggttgaggctgctgtgagctgagatcacgccatagcactccagcctgggtaacagagcaagatcctgtctcaaaacaaacaaatgaacaaaaaacaaaaagacagctgatagttattgctcctttgagccgaaacctgggcgcgccaggccaccagggcagccagctgttggtgttttccactgtgggcttgtcacagggggagctaaaaatctgtgtggtttgtctttgtgtgtttgtgtgaaggttcaagaagacgtggaagctgcgggctctgaaggaaggcaagacaagcatgcatccgccgtactctttggggcagctggtcccggagaggcctcgacccaccccagtgcttgttcctctcatctccccaccggtgtcccccagcagcctggggtctgacaatacctcgagccacaaccgaccagatgccagggacccacggagcccttatgacatcagcaatacagactacttcttccccagatagctggctgggtggcaccagcagcctggaccctgtggatgacaaaacacaaacgggctcagcaaaagatgcttctcactgccatgccagcttatctcaggggtgtgcggcctttggcttcacggaagagccttgcggaaggttctacgccaggggaaaatcagcctgctccagctgttcagctggttgaggtttcaaacctccctttccaaatgcccagcttaaaggggttagagtgaacttgggccactgtgaagagaaccatatcaagactctttggacactcacacggacactcaaaagctgggcaggttggtgggggcctcggtgtggagaagcggctggcagcccacccctcaacacctctgcacaagctgcaccctcaggcaggtgggatggatttccagccaaagcctcctccagccgccatgctcctggcccactgcatcgtttcatcttccaactcaaactcttaaaacccaagtgccttagcaaattctgtttttctaggcctggggacggcttttacttaaaccgccaaggctgggggaagaagctctctcctccctttcttccctacagttgaaaaacagctgagggtgagtgggtgaataatacagtatctcagggcctggtcgttttcaacagaattataattagttcctcattagcattttgctaaatgtgaatgatgatcctaggcatttgctgaatacagaggcaactgcattggctttgggttgcaggacctcaggtgagaagcagaggaaggagaggagaggggcacagggtctctaccatcccctgtagagtgggagctgagtgggggatcacagcctctgaaaaccaatgttctctcttctccacctcccacaaaggagagctagcagcagggagggcttctgccatttctgagatcaaaacggttttactgcagctttgtttgttgtcagctgaacctgggtaactagggaagataatattaaggaagacaatgtgaaaagaaaaatgagcctggcaagaatgcgtttaaacttggtttttaaaaaactgctgactgttttctcttgagagggtggaatatccaatattcgctgtgtcagcatagaagtaacttacttaggtgtgggggaagcaccataactttgtttagcccaaaaccaagtcaagtgaaaaaggaggaagagaaaaaatattttcctgccaggcatggtggcccacgcacttcgggaggtcgaggcaggaggatcacttgagtccagaagtttgagatcagcctgggcaatgtgataaaaccccatctctacaaaaagcataaaaattagccaagtgtggtagagtgtgcctgaagtcccagatacttggggggctgaggtgggaggatctcttgagcctgggaggtcaaggctgcagtgagccgagattgcaccactgcactccagcctgggtgacagagcaagtgagaccctgtctcaaaaaaagaaaaagaaaaagaaaaaatattttccctattagagaagagattgtggtttcattctgtattttgtttttgtcttaaaaagtggaaaaatagcctgcctcttctctactctagggaaaaaccagcgtgtgactactcccccaggtggttatggagagggtgtccggtccctgtcccagtgccgagaaggaagcctcccacgactgcccggcagggtcctagaaattccccaccctgaaagccctgagctttctgctatcaaagaggttttaaaaaaatcccatttaaaaaaaatcccttacctcggtgccttcctctttttatttagttccttgagttgattcagctctgcaagaattgaagcaggactaaatgtctagttgtaacaccatgattaaccacttcagctgacttttctgtccgagctttgaaaattcagtggtgttagtggttacccagttagctctcaagttatcagggtattccagagtggggatatgatttaaatcagccgtgtaaccatggacccaaaatttaccagaccacaaaacttttctaatactctaccctcttagaaaaaccaccaccatcaccagacaggtgcgaaaggatgaaagtgaccatgttttgtttacggttttccaggtttaagctgttactgtcttcagtaagccgtgattttcattgctgggcttgtctgtagattttagaccctattgctgcttgaggcaactcatcttaggttggcaaaaaggcaggatggccgggcgcggtggctcacgcctgtaatcctagcactttgggaggccaaggtgggaggattgcttgagctcaggagtttgagaccaacctgggtaacatagtgagacaccatctctattatgaacaataacagttaagaaaaaaaaaggcaggcaggcggttatggtggttccctcccatcccaccacataaagtttctgagacttgagaacagcaaaatgctgttaaagggaaatattaagaatgagaatctgcagtaagggtgattctgtgcccacagttcttcaattctttataccgttttacccacatgtggtgttaccaaagccgggcagaaccatgctagcggaagatgtgaaatccagatagctcattattgccaagagctaggcagctttgatctccaaattgttattgctttcatttttattgtaatggaattgctttgttttgtttttttgtttttgtattgaagagggttgttttccctttatttttcataagctaatgtaaatgaagaaaaaatgtcttctctgggctgtaggcctggctcagcgtacacaggtatacatcctaagctctctatgttctctaatctgtggtgactgaacatgtgtctcaatgcacggggcatttctacctgtgtttctgcagcacccccactgccttgagtccccagcagtgctgttatttgcctaacacctgtagccatctgccacgcagccagacgtgaaacgctgagacagagaccatttaggttaaatacgacagcttatcctgctgggtggggaaagtaaaaaatatgctggttcaaggcctaaagtaaaatgatcaataatgtttgtagcattaatgaaatattttcaagaaatgtgtccaggggtagcactggctatgttgacgaggcctttggtaactcagagagctcttggccctgatggggacttgcccttacgctttctttatcaggctctgagttcacacggagcctctggcacttccctgctgtcttgggagaaaggaaactggttgccgcggcaggttgtggaatctgttgctggaaccaggctggaagcccacctggtagtgaacagggcccagtggggcaggctgggcatgttgtggtctatgggtttgtttcctggagaatgttcaggaatgtcttcccagctgctttggtgctgagctctattatctcacagcacgtccagaaggctaacccaggtggggaggatgctgacaccagctccaggtggagttggtggtcttaatttggagatgcaggggcaacctgtgaccctttgaggcaagagccctgcacccagctgtcccgtgcagccgtgggcaggggctgcacacggaggggcaggcgggccagttcagggtccgtgccaggccctcctcagtgccctgtgaaggcctcctgtcctccgtgcggctgggcaccagcaccagggagtttctatggcaaccttagtgattattaaggaacactgtcagttttatgaacatatgctcaaatgaaattctactttaggaggaaaggattggaacagcatgtcacaaggctgttaattaacagagagaccttattggatggagatcacatctgttaaatagaatacctcaactctacgttgttttcttggagataaataatagtttcaagtttttgtttgtttgttttacctaattacctgaaagcaaataccaaaggctgatgtctgtatatggggcaaagggtcagtatatttttcagtgttttttttctaccagctattttgcatttaaagtgaacattgtgtttggaataaatactcttaaaaaatacccttgaaatgtaattattgctttgggcatctgggtcatctaaaaaaaaaaggcttgcctgattcatgaggagaaaggagtgaggaaggggggataattaagtagaaccatttttgggggggtatccccttaatgcaggattaaaggaccgctcaaaagtaggtaagttcaaggaagaagcagcaatttctcagaaggctttaattatgacagtatttcccacacgagtcctgggatttctggaaggggtgtgtgggattttgccacgcttacatcacattaccaggtggtggacaggtggggaaggaaaaggaagggccattatttgtcagaagactgtttattggacctgggagggggtgtaacactatcacaaaggccaccctgaactcttgatcatcagatagaccaaatccatcccctactgaaaaggatcttaggtaggaaaaacttgggacacagccatccacatcttccaaacagaggaaaagccatcatgcggactctttgtgggtgagagctactgtgtaaacagttcagggatggggaggcgagaactgcagggaagcctggaaattatgtaactccactcaaagctggactgagaggcgccgcctctgggcccccacctgggcagtcagaggaaagccacaggacaggtgatggtggccgccatctccttcaggacaccatgctctcctctttgaggctggtccttgtcttgcagaaagtgacacagggaccagatgtcacccaggtggccaggctgcgtgggccatggagggggcacgggagtgggcactggagccaggacgtggagggagctgcctccctttcttcatggcattgctgttaggatgacatggttacggtgctctttccagaagaacttaggagagcagatggtgatttctgtagaggatggcaaggaatatgcagttactggagcagccttctaagaaagcattttccttatttactgaggcacagggcaaccaaacctttctgaatatctgtgagaattacagggcaggggcaggaaacagtgtttgccatcctccatcctccagtagcagaggtgtgctggcgaggtgaaaggccttttaaggccaggtgcggtggctcactcctataatcctagcactttgggaggctgaggtgggtggatcacttgaggtcaggagttcgagaccagcctggccaacatggcaaaaccccgtctctactaaaaatacaaaaattagctgcatgtggtggcgggcacctgtaatcccagctattctggaggctgaggcaggagaatcgcttgaacctgggagacagaggttgcagtgagatgagatcgtgccattgcactccagcctgggcaacagagccagactctgtctcaaaaataaaaaataaaaaaaatttgcctggcatggtggcggtcacctgtgattccagctactagggaggctgaggcaggaggactgcttgaacccgggaggcggaggtttcagtgagctgagatcacaccactgcactccagcctgggtgacaaagagtgagtgagactccatctcaaaaaaaaaaacacaaaaaaaaataaaagaaaggttcaaatgcagcactgctgtaagggctggggcgagagctcagagcaactccttaggcggagtggtgagcccgcgggccacagggtgaggggcctgttgcaccatctttcaaacactacccaatctctaatgtctttatggaagttcccatcttctgcaggtgtatgtcacttaaaaaacaaaacaggccaggcgcagtggctcattcctgtaatcccagcactttgagatgctgaggtgggaggattgctcgaggccataagttcaagaccagcctggtgcacatagcatgaccctatctctaaataagaaaaaataaaaatgagaaaagaggaagaagtacatttccctatatctacaaaaaagaaaaaaaattaaccaggtgtggtggcacctgcctgtagtcccagctactcaagagggtgaggcgggaggattgcttgagcccagagttcaaggttatagtgagccataattgtgctactgcgctccaccctgggtgacagcaagaccttgtctcaaaaaagaaagaaacaagcaaacaaaacaccactagttcagccatgtcctacttcatacccagtttttgatgacaatccacaacttgaataaagttaagtttttcagtactctctctctctctctctgtgtgtgtgtgtgtgtaagcattcacactacaggtgtatgcattattaaattaagggtgttctttcttctaacttcaaattgcttaataaagctgcccaatgtcctgaaaaaaaatagctcactgcatcatgggaagctgcattttgatatgtcagtatgattttttaaagaatgaaatgtatcaagaagccaggtacagtggctcacgcctgtaatcccagcactttgggaggccaaggcgggtggatcacttgaggtcaggagttcaagaccagcctggccaacatggtgaaaccccatctctactcaaaatacaaaaattagctgggcatggtggtgggcgcctgtagtcccagctactcaggaggctgaggcatgagaatcgcttgaacctgggaggtagaggttgcagtgagcactctgtctcaaaaaaaaaaattatcagaagagcaactttattctattttggtttttaaattagtgtgctgctctataagagtttttaaatgatggagagaggtacggcatggtagagtctgttaccagagatagatgaagagagaagtaaaaagcagaggaagccagcacctgcacgcaccactcacgcaggcagcgtgttttcctgcagaacataaatgcacctcagcatgtaatgcggccagcttgttagaaccccattcctggcttcaccctcagggattccagttcaataggtctgagctgggcccctagaaagctatataagctgcccagatggttctgatgaaggtggtgatccatcctgagagtggctggaccgtgagttccacaatgaggtggatgctgggggttcctcatacttccggacctggtgggcttcagtggatcccttctgtgggtgggcctgtgcatcagaaggaggccaggtgccaacctttgacccgggcaatcacagtagcatgagtgtaagttacacaggtgatgctgctgtacagccagctttgaagatctctgtgctggggaccgcagggctagaggtaagattcacagcaacatgtttcagtgggtgttaactagaaaacaaaaatctatggcagcaaagcagtacaccaactggccttactggttacctagaagttcacaggccctttgtggtagagatatctactaaaattacctaataataatggctactggctgggcgcagtggctcacacctgtaattccagcattttgggaggccaaggcagggggatggcttgaggccaggagttcaagacgagcctggacaacatagtgagacccatctctacaaaataatttttttttttgagatggagttctgctgttgttgccaaggctggagtgcaatggcacaatctcggctcaccacaacctctgcctcccgggttcaagcgattctcctgcctcagcctcccgagtagctgggattacaggcatgtgccaccatgctcggctaattttttgtatttttagtagagacggggtttctccgtgttggtcaggctggtctcaaactcccaaccttaggtgatccgcctgtctcagcctcccaaagtgctgggattacaggtgtgagccactgagcccagctctacaaaataatttttaaaaaaccaattaaccgagcatggtggtgcatgcctgtagtcccagctacctgggaggctgaagcaggagaatccctttagcccaggagttggaggctgcagtgagccgtgatagtaccactgtactccagcccgggcaacaggttgagacgctgtgtgttggggggacaggggtcgaaggggaagaaagaaaaaaaagaatggcagctgggcgctgtggctcatgcttgtaatcccggcactttgggaggctgaagtggatggattgcttgagcccaggagttcgagaccagtctggccaacatggcaaaaccctgtctctactaaaaatacaaaaaactagctgggcatgctggcacatgcctgtagtcgtagctcctcgggaggctgaggtgggaggatcacctgagcctgggagtgtgaggctgcagtgggctgtgatcacaccactgccttccaacctgggtgacgagtgagaccctgcctcaaaaaataaaaaaaaaaaaagtaaataacggctaccatttactgcctctccaccatgtgctttataaacaggatattcttccttaatgtggctgccatgtaagtattctcacctgtttacagatgaggcaactgaggcttatattgaagatggtggtccaagatgcccacgctagttaagaggctgaactagactccaaacctgggcctgctggactggaaggctggtgctctttgcttttgccatggggctccggcccccagccactggtgactacctcatgggcttctcttaccaagccctttctcaggccaggtgccctcaccctgtgtggggtggggcctgacccactcaccccgggaggagatggacctggtatcctcatgtggtttgtcacgtttatcagtgtgagctggggctggaggctgacccatgggagtctgagcgcacatacaaaggcatggcttgggggctcccataggtgatcctaaggcagtggcagccagagatgggtctcaaaggagaggggcaaaactagttcctgacatagttaactctctctgatcagggaccaaatcaagccacttcccctccatctatacctagccacacctctgcactgcatgaatggtttggttttttcctgttggttccttggtataaactttgatgaacttcctgaaaattctcaaattgtgctttatttatttatttattattttttagacagagtcttgctctgttgcccaggctggagtgcagtggtgccatcttggctcaccacaactgcctcccaggttcaagcgattctcctgcctcagcctcctgagtagctgggatcacaggcacacaccaccatgcctggataatttttgtatttttagtagagatggggttttgctatgttggccaggctggtcttgaactcctgacctcaagtgatctgcccacctcggcctcccaaagtgctattacaggcgtgagccaccacgcccagccaaattgtgttttactgatggtatggaagccttattacatccactccctctgaaaggatgaacggtcaccactctgtgagtggagctgctctctgggtgcaagaattcattcaaggaatgtttactaggccactgtgctgggtgtggggtacaagaggaaccaatgtcctcctccaggagttggcagtatgcctggtcagccacacaattaacaagcaaatgctgtgtctgggagcaaatgactaatctggtctagggagtgagggagcagagtaggagggtctggggagtgggaggcctgccgggggtacaggggagggctgagggcaggggccaggtgggagggaggccgccttggatgtctactatgttgagcacctctgcaatgttcttttttctttttttgacagaatttcactctttttgcccaggctggagtgcaacggcgtgatcttggctcaccgcaacctccgcctcccaggttcaagcgattctcctgcctcagcctcctgagtagctgggattacaggcatgcgccaccatgcctggctaattttgtattttttagtagagacagggtttccccatgtcggccaggctggtcctgaactcccgacctcaggtgatccacctgcctcggcctcccgaagtgctgggattacaggtgtgagccaccatgcccagccaaacctctgcaatgttctaagtgcatttaggaagtcactgaagaccggatttgctcttttttcttgtgtacatatttaatttttttaaatgagcattgcttttagaattaaagatagctttattaaacaattataacccttctattttggaatagtccaatcatattatactgcctatgaaaaattgtttattaaaatgtacaagaagtaggtggggatcacagacaaaacaaaattggctgtaagacagtaattgttgatgctgggtgatgggacagggtggttcattgtattcatttctttttttgagacagtgtctcactctgttgcccaggctggagtgtagtggcacaatctcagctaactgcaacctccacctcccggttggaggtggatcgctcctgacctcaagtgatctgcctgcgttggcctcccaaagtgctgggattacaggcatgagccactgtgcccagcccattgtattagtttctaaaaaagcttgagattctccattttaaaacgtgcaagggttttagaaagaatgtttctcttgcaagtacaccatctgaagcagtccaggacggtgcagtggctcacacctacaatccttgtactttgggaggctgagtcaggatgattgcttcagcccaggagttcgagatcagcctaagcaatatagtgagaccttgtcgctacaaaaattcaaaacattagccaggtatggtggcgcacacctgtggtcccagccacttgggaagttgaggtgggagaattgcttgagcccagaaggtcaaggttgtggtgagccatgataacaccatcgcactcctgcctgggaaacagagaagaccctgtctcaaaaataaagtaaaatcaggccgagcacggtggttcatgcctgtaatcccagcactttgggaggtcgaggcaggcagatcacaaggtcaggcgtttgagatcagcctggccaacatagtgaaaccccgtctctactaaaaatacaaaaattagccaggtgtggtggtgggcacctataatcccagctactcaggaggctgaggcttggacccgggaagcagaggttgcagtgagccacgattgcatcactgcactccagcctaggcgacagagtgagactctgtctcaaaaaaaaagtaaagcaatccaaaataatccataccgtctcagaaaaaaaaaaaagtagaataaagcaatctgaaataatccacaccttttttatcttttaagtaaaatatgtttcttgccaacaacatgctggttgatagcttgatcaacaaattggcttttatgtgctcatcaagtaataatttatctttccctcaatccaaattagtaaacctgtttatttatgcacataaattagaaggcaatcatttaaaaatgtcatgtagaaagtattttaaatttgaatcaagacattacagtgattcatactacatgattcacaaaggggaagtaattctggtgctacctgtggattctggaaatgataacctcatgcctcacactgaatctcctcaaggtatgtttatcagagcttaaatgaccttcaggacttcacactacccagttctacaggcagagcctctcccaagcaggggaaaggctgcctaggcccatggacacaacttgccagacccagcagaggattgtcctggaggtggagatggataccgaaaacccaattcctttttcccttgctctgagtccatgtgcccctctatgggtagagagcacattgatcacacaggtgacctgaatgtccagtctgctagatgcatttccattgtaagataatagactggcatttttgtgtgtgtggtaagaaatgcattaacataaaatttaccatcttaaccacctattttaattttttttataagagatggggtttcaccacgttgcccgggctggtctcgaactccttcgctcaagtgatccgcctactttggcctcccaaagccctgggattacaggcataagccactacacttggcctatgttaaccatttctaagtgtgcagttcagcagtgttaactacattcatattgttgtgcacccaatctccaggacttttcattatctcatgcagaaactctgggctgggaatggtgggtcatgcctataatctcagcactttgggaggccaaggctggtggatcacatgaggtcaggagtttgagaccagcctggccaacatggtgaaaccccgtttctactaacaatacaaaaattagctgggtgttgtggcgcatgcctgtagtcccagctacttgggaggctgaggcaggagaattgctggaacctgggaggtggaggttgcagtgagttgagattgcaccactgcactccagcctgggcgacagagcaagacactgtctcaaaaaaaaaaaaaaaaaaagaaagaaaagaaaagaaaactctgcactcattaaacaactccccatttcctccttccccagcccctggcaactaccattctactttctatgaatttgactactctgggtacctcatgtaagtggaatcatacagtatttgtctttttgtgactgacgggtttcactcagcgtaatggtctgtgtcaggattcccttccttgttgaggctgaatgatactctgctgtattgccagcgtcagttatgggagtagcaagataatgaagcacaccctgcccagtggcttccagaagttcctggtctacaaggtcaaggagccggaatgaagcgctgctgatgtgcaacaaattatactgagctgagattgctcacaatgtttcctccagaaccacaaggccactgtggagcgagcagccccgtgggccatcagtcaccactcccaaggccaggctgtgcagcgaagaaaatgaacagacaactcagtctatgttttgtttttaaatgaaatcataaaaagtgcaaaaaaaaaaaaaaaaaacactctagagtgagacctgggccgcaatctgggctctaccacttactatgactgacccaagacaagttatttcatcattctaagcacccgtgtttttatctgaaaaacaaggttcccacctggctgagttgtggcagattaaatgagatgctgtatgatgaaaagcatttgttcagcagcacacctggtgcggaaaaagagtctattctcactacttacatcttggcctttcacagggtcagaatccaacattcaacactcaaaccctgggtgcttgtaaacacgtgttcaatctgaattctgaaaaccattactctaattgctcgggtggtgggtggcgggagcatttcttaatgcaaacttcctcttctcttaaacacagatgggttaaaacaataggcacttgttccacctggtggcaacttacataaatgtttaatggaagttaaaaacttgaaaccatgttaggaattttggaggggaaaactttttgatagcagactcaacagtatgcccttctaggacctgacgtgaatttatttgtgcatttccaaataggagcttccaacagggcttctccaccattggctgtgtatccaaatcacctggtacaatttttttttaaaataggtttttgaactttgcaacagacttagggcatcccacagatggcatgggacatttgtattaataacaaactgataaaaacagaagcagagcccaaatcttctatctagtgagggatgagaaccagtgcactaactttcgactcaggaagagatgggccaggaaatggcagtaaaacatcactgtattactattttact

SEQ ID NO: 1404 - DNA, 3759 bp, Homo sapiens
gtgtctaacagtcagaacagtccggccgaagacttccaggagccgtgccagtattcccaggagtcccagaagttctcctgccagttagcagtcccggagggagacagctctttctacatagtgtccatgtgcgtcgccagtagtgtcgggagcaagttcagcaaaactcaaacctttcagggttgtggaatcttgcagcctgatccgcctgccaacatcacagtcactgccgtggccagaaacccccgctggctcagtgtcacctggcaagacccccactcctggaactcatctttctacagactacggtttgagctcagatatcgggctgaacggtcaaagacattcacaacatggatggtcaaggacctccagcatcactgtgtcatccacgacgcctggagcggcctgaggcacgtggtgcagcttcgtgcccaggaggagttcgggcaaggcgagtggagcgagtggagcccggaggccatgggcacgccttggacagaatccaggagtcctccagctgagaacgaggtgtccacccccatgcaggcacttactactaataaagacgatgataatattctcttcagagattctgcaaatgcgacaagcctcccagtgcaagattcttcttcagtaccactgcccacattcctggttgctggagggagcctggccttcggaacgctcctctgcattgccattgttctgaggttcaagaagacgtggaagctgcgggctctgaaggaaggcaagacaagcatgcatccgccgtactctttggggcagctggtcccggagaggcctcgacccaccccagtgcttgttcctctcatctccccaccggtgtcccccagcagcctggggtctgacaatacctcgagccacaaccgaccagatgccagggacccacggagcccttatgacatcagcaatacagactacttcttccccagatagctggctgggtggcaccagcagcctggaccctgtggatgacaaaacacaaacgggctcagcaaaagatgcttctcactgccatgccagcttatctcaggggtgtgcggcctttggcttcacggaagagccttgcggaaggttctacgccaggggaaaatcagcctgctccagctgttcagctggttgaggtttcaaacctccctttccaaatgcccagcttaaaggggttagagtgaacttgggccactgtgaagagaaccatatcaagactctttggacactcacacggacactcaaaagctgggcaggttggtgggggcctcggtgtggagaagcggctggcagcccacccctcaacacctctgcacaagctgcaccctcaggcaggtgggatggatttccagccaaagcctcctccagccgccatgctcctggcccactgcatcgtttcatcttccaactcaaactcttaaaacccaagtgccttagcaaattctgtttttctaggcctggggacggcttttacttaaaccgccaaggctgggggaagaagctctctcctccctttcttccctacagttgaaaaacagctgagggtgagtgggtgaataatacagtatctcagggcctggtcgttttcaacagaattataattagttcctcattagcattttgctaaatgtgaatgatgatcctaggcatttgctgaatacagaggcaactgcattggctttgggttgcaggacctcaggtgagaagcagaggaaggagaggagaggggcacagggtctctaccatcccctgtagagtgggagctgagtgggggatcacagcctctgaaaaccaatgttctctcttctccacctcccacaaaggagagctagcagcagggagggcttctgccatttctgagatcaaaacggttttactgcagctttgtttgttgtcagctgaacctgggtaactagggaagataatattaaggaagacaatgtgaaaagaaaaatgagcctggcaagaatgcgtttaaacttggtttttaaaaaactgctgactgttttctcttgagagggtggaatatccaatattcgctgtgtcagcatagaagtaacttacttaggtgtgggggaagcaccataactttgtttagcccaaaaccaagtcaagtgaaaaaggaggaagagaaaaaatattttcctgccaggcatggtggcccacgcacttcgggaggtcgaggcaggaggatcacttgagtccagaagtttgagatcagcctgggcaatgtgataaaaccccatctctacaaaaagcataaaaattagccaagtgtggtagagtgtgcctgaagtcccagatacttggggggctgaggtgggaggatctcttgagcctgggaggtcaaggctgcagtgagccgagattgcaccactgcactccagcctgggtgacagagcaagtgagaccctgtctcaaaaaaagaaaaagaaaaagaaaaaatattttccctattagagaagagattgtggtttcattctgtattttgtttttgtcttaaaaagtggaaaaatagcctgcctcttctctactctagggaaaaaccagcgtgtgactactcccccaggtggttatggagagggtgtccggtccctgtcccagtgccgagaaggaagcctcccacgactgcccggcagggtcctagaaattccccaccctgaaagccctgagctttctgctatcaaagaggttttaaaaaaatcccatttaaaaaaaatcccttacctcggtgccttcctctttttatttagttccttgagttgattcagctctgcaagaattgaagcaggactaaatgtctagttgtaacaccatgattaaccacttcagctgacttttctgtccgagctttgaaaattcagtggtgttagtggttacccagttagctctcaagttatcagggtattccagagtggggatatgatttaaatcagccgtgtaaccatggacccaaaatttaccagaccacaaaacttttctaatactctaccctcttagaaaaaccaccaccatcaccagacaggtgcgaaaggatgaaagtgaccatgttttgtttacggttttccaggtttaagctgttactgtcttcagtaagccgtgattttcattgctgggcttgtctgtagattttagaccctattgctgcttgaggcaactcatcttaggttggcaaaaaggcaggatggccgggcgcggtggctcacgcctgtaatcctagcactttgggaggccaaggtgggaggattgcttgagctcaggagtttgagaccaacctgggtaacatagtgagacaccatctctattatgaacaataacagttaagaaaaaaaaaggcaggcaggcggttatggtggttccctcccatcccaccacataaagtttctgagacttgagaacagcaaaatgctgttaaagggaaatattaagaatgagaatctgcagtaagggtgattctgtgcccacagttcttcaattctttataccgttttacccacatgtggtgttaccaaagccgggcagaaccatgctagcggaagatgtgaaatccagatagctcattattgccaagagctaggcagctttgatctccaaattgttattgctttcatttttattgtaatggaattgctttgttttgtgtaggcctggctcagcgtacacaggtatacatcctaagctctctatgttctctaatctgtggtgactgaacatgtgtctcaatgcacggggcatttctacctgtgt

SEQ ID NO: 1405 - protein, 277 aa, Homo sapiens
MCVASSVGSKFSKTQTFQGCGILQPDPPANITVTAVARNPRWLSVTWQDPHSWNSSFYRLRFELRYRAERSKTFTTWMVKDLQHHCVIHDAWSGLRHVVQLRAQEEFGQGEWSEWSPEAMGTPWTESRSPPAENEVSTPMQALTTNKDDDNILFRDSANATSLPVQDSSSVPLPTFLVAGGSLAFGTLLCIAIVLRFKKTWKLRALKEGKTSMHPPYSLGQLVPERPRPTPVLVPLISPPVSPSSLGSDNTSSHNRPDARDPRSPYDISNTDYFFPR

SEQ ID NO: 1406 - DNA, 5727 bp, Homo sapiens
ggcggtcccctgttctccccgctcaggtgcggcgctgtggcaggaagccaccccctcggtcggccggtgcgcggggctgttgcgccatccgctccggctttcgtaaccgcaccctgggacggcccagagacgctccagcgcgagttcctcaaatgttttcctgcgttgccaggaccgtccgccgctctgagtcatgtgcgagtgggaagtcgcactgacactgagccgggccagagggagaggagccgagcgcggcgcggggccgagggactcgcagtgtgtgtagagagccgggctcctgcggatgggggctgcccccggggcctgagcccgcctgcccgcccaccgccccgccccgcccctgccacccctgccgcccggttcccattagcctgtccgcctctgcgggaccatggagtggtagccgaggaggaagcatgctggccgtcggctgcgcgctgctggctgccctgctggccgcgccgggagcggcgctggccccaaggcgctgccctgcgcaggaggtggcgagaggcgtgctgaccagtctgccaggagacagcgtgactctgacctgcccgggggtagagccggaagacaatgccactgttcactgggtgctcaggaagccggctgcaggctcccaccccagcagatgggctggcatgggaaggaggctgctgctgaggtcggtgcagctccacgactctggaaactattcatgctaccgggccggccgcccagctgggactgtgcacttgctggtggatgttccccccgaggagccccagctctcctgcttccggaagagccccctcagcaatgttgtttgtgagtggggtcctcggagcaccccatccctgacgacaaaggctgtgctcttggtgaggaagtttcagaacagtccggccgaagacttccaggagccgtgccagtattcccaggagtcccagaagttctcctgccagttagcagtcccggagggagacagctctttctacatagtgtccatgtgcgtcgccagtagtgtcgggagcaagttcagcaaaactcaaacctttcagggttgtggaatcttgcagcctgatccgcctgccaacatcacagtcactgccgtggccagaaacccccgctggctcagtgtcacctggcaagacccccactcctggaactcatctttctacagactacggtttgagctcagatatcgggctgaacggtcaaagacattcacaacatggatggtcaaggacctccagcatcactgtgtcatccacgacgcctggagcggcctgaggcacgtggtgcagcttcgtgcccaggaggagttcgggcaaggcgagtggagcgagtggagcccggaggccatgggcacgccttggacagaatccaggagtcctccagctgagaacgaggtgtccacccccatgcaggcacttactactaataaagacgatgataatattctcttcagagattctgcaaatgcgacaagcctcccagtgcaagattcttcttcagtaccactgcccacattcctggttgctggagggagcctggccttcggaacgctcctctgcattgccattgttctgaggttcaagaagacgtggaagctgcgggctctgaaggaaggcaagacaagcatgcatccgccgtactctttggggcagctggtcccggagaggcctcgacccaccccagtgcttgttcctctcatctccccaccggtgtcccccagcagcctggggtctgacaatacctcgagccacaaccgaccagatgccagggacccacggagcccttatgacatcagcaatacagactacttcttccccagatagctggctgggtggcaccagcagcctggaccctgtggatgacaaaacacaaacgggctcagcaaaagatgcttctcactgccatgccagcttatctcaggggtgtgcggcctttggcttcacggaagagccttgcggaaggttctacgccaggggaaaatcagcctgctccagctgttcagctggttgaggtttcaaacctccctttccaaatgcccagcttaaaggggttagagtgaacttgggccactgtgaagagaaccatatcaagactctttggacactcacacggacactcaaaagctgggcaggttggtgggggcctcggtgtggagaagcggctggcagcccacccctcaacacctctgcacaagctgcaccctcaggcaggtgggatggatttccagccaaagcctcctccagccgccatgctcctggcccactgcatcgtttcatcttccaactcaaactcttaaaacccaagtgccttagcaaattctgtttttctaggcctggggacggcttttacttaaaccgccaaggctgggggaagaagctctctcctccctttcttccctacagttgaaaaacagctgagggtgagtgggtgaataatacagtatctcagggcctggtcgttttcaacagaattataattagttcctcattagcattttgctaaatgtgaatgatgatcctaggcatttgctgaatacagaggcaactgcattggctttgggttgcaggacctcaggtgagaagcagaggaaggagaggagaggggcacagggtctctaccatcccctgtagagtgggagctgagtgggggatcacagcctctgaaaaccaatgttctctcttctccacctcccacaaaggagagctagcagcagggagggcttctgccatttctgagatcaaaacggttttactgcagctttgtttgttgtcagctgaacctgggtaactagggaagataatattaaggaagacaatgtgaaaagaaaaatgagcctggcaagaatgcgtttaaacttggtttttaaaaaactgctgactgttttctcttgagagggtggaatatccaatattcgctgtgtcagcatagaagtaacttacttaggtgtgggggaagcaccataactttgtttagcccaaaaccaagtcaagtgaaaaaggaggaagagaaaaaatattttcctgccaggcatggtggcccacgcacttcgggaggtcgaggcaggaggatcacttgagtccagaagtttgagatcagcctgggcaatgtgataaaaccccatctctacaaaaagcataaaaattagccaagtgtggtagagtgtgcctgaagtcccagatacttggggggctgaggtgggaggatctcttgagcctgggaggtcaaggctgcagtgagccgagattgcaccactgcactccagcctgggtgacagagcaagtgagaccctgtctcaaaaaaagaaaaagaaaaagaaaaaatattttccctattagagaagagattgtggtttcattctgtattttgtttttgtcttaaaaagtggaaaaatagcctgcctcttctctactctagggaaaaaccagcgtgtgactactcccccaggtggttatggagagggtgtccggtccctgtcccagtgccgagaaggaagcctcccacgactgcccggcagggtcctagaaattccccaccctgaaagccctgagctttctgctatcaaagaggttttaaaaaaatcccatttaaaaaaaatcccttacctcggtgccttcctctttttatttagttccttgagttgattcagctctgcaagaattgaagcaggactaaatgtctagttgtaacaccatgattaaccacttcagctgacttttctgtccgagctttgaaaattcagtggtgttagtggttacccagttagctctcaagttatcagggtattccagagtggggatatgatttaaatcagccgtgtaaccatggacccaaaatttaccagaccacaaaacttttctaatactctaccctcttagaaaaaccaccaccatcaccagacaggtgcgaaaggatgaaagtgaccatgttttgtttacggttttccaggtttaagctgttactgtcttcagtaagccgtgattttcattgctgggcttgtctgtagattttagaccctattgctgcttgaggcaactcatcttaggttggcaaaaaggcaggatggccgggcgcggtggctcacgcctgtaatcctagcactttgggaggccaaggtgggaggattgcttgagctcaggagtttgagaccaacctgggtaacatagtgagacaccatctctattatgaacaataacagttaagaaaaaaaaaggcaggcaggcggttatggtggttccctcccatcccaccacataaagtttctgagacttgagaacagcaaaatgctgttaaagggaaatattaagaatgagaatctgcagtaagggtgattctgtgcccacagttcttcaattctttataccgttttacccacatgtggtgttaccaaagccgggcagaaccatgctagcggaagatgtgaaatccagatagctcattattgccaagagctaggcagctttgatctccaaattgttattgctttcatttttattgtaatggaattgctttgttttgtttttttgtttttgtattgaagagggttgttttccctttatttttcataagctaatgtaaatgaagaaaaaatgtcttctctgggctgtaggcctggctcagcgtacacaggtatacatcctaagctctctatgttctctaatctgtggtgactgaacatgtgtctcaatgcacggggcatttctacctgtgtttctgcagcacccccactgccttgagtccccagcagtgctgttatttgcctaacacctgtagccatctgccacgcagccagacgtgaaacgctgagacagagaccatttaggttaaatacgacagcttatcctgctgggtggggaaagtaaaaaatatgctggttcaaggcctaaagtaaaatgatcaataatgtttgtagcattaatgaaatattttcaagaaatgtgtccaggggtagcactggctatgttgacgaggcctttggtaactcagagagctcttggccctgatggggacttgcccttacgctttctttatcaggctctgagttcacacggagcctctggcacttccctgctgtcttgggagaaaggaaactggttgccgcggcaggttgtggaatctgttgctggaaccaggctggaagcccacctggtagtgaacagggcccagtggggcaggctgggcatgttgtggtctatgggtttgtttcctggagaatgttcaggaatgtcttcccagctgctttggtgctgagctctattatctcacagcacgtccagaaggctaacccaggtggggaggatgctgacaccagctccaggtggagttggtggtcttaatttggagatgcaggggcaacctgtgaccctttgaggcaagagccctgcacccagctgtcccgtgcagccgtgggcaggggctgcacacggaggggcaggcgggccagttcagggtccgtgccaggccctcctcagtgccctgtgaaggcctcctgtcctccgtgcggctgggcaccagcaccagggagtttctatggcaaccttagtgattattaaggaacactgtcagttttatgaacatatgctcaaatgaaattctactttaggaggaaaggattggaacagcatgtcacaaggctgttaattaacagagagaccttattggatggagatcacatctgttaaatagaatacctcaactctacgttgtttt

SEQ ID NO: 1407 - protein, 464 aa, Homo sapiens
MLAVGCALLAALLAAPGAAPRRCPAQEVRVLTSLPGDSVTLTCPGVEPEDNATVHWVLRKPAAGSHPSRWAGMGRRLLLRSVQLHDSGNYSCYRAGRPAGTVHLLVDVPPEEPQLSCFRKSPLSNVVCEWGPRSTPSLTTKAVLLVRKFQNSPAEDFQEPCQYSQESQKFSCQLAVPEGDSSFYIVSMCVASSVGSKFSKTQTFQGCGILQPDPPANITVTAVARNPRWLSVTWQDPHSWNSSFYRLRFELRYRAERSKTFTTWMVKDLQHHCVIHDAWSGLRHVVQLRAQEEFGQGEWSEWSPEAMGTPWTESRSPPAENEVSTPMQALTTNKDDDNILFRDSANATSLPVQDSSSVPLPTFLVAGGSLAFGTLLCIAIVLRFKKTWKLRALKEGKTSMHPPYSLGQLVPERPRPTPVLVPLISPPVSPSSLGSDNTSSHNRPDARDPRSPYDISNTDYFFPR

SEQ ID NO: 1408 - DNA, 47971 bp, Mus musculus
  misc_feature (1)...(47971): n = A,T,C or G
cccaaagagaagggtctcatcaaaaaatgtttatggttttatagggtgcttttagttgagtgagaatgtgacagaagagtgttaaagcacaacaacaacaataaaacctatcacaggcaaaaaggaactatagtaagtaaaattttaccaggggatctctggccaataggattacaggaggctgtggtcaagctgagacaagctctggggccagcagtcttttgataaatatagaattctcactttccatttcccaaagggcttcagtcccacacaagacatccattttggtgtcttaggtgactcattttagggcttgaccaaactggtaagaccatgctcctggcttagcggtatctctcccatttctctgaggctttgcaaactgtctatttactcatcagctatgccaaccttttataagctgaagaatgaaagggctacctgggaaagtgactttatagaacaagaaaaaagatgtgtggagctggatcaaccactgtgtactaggtttaaatctatttctgtttattctaggtccccagaaagaggtagtaagaagtggtacgtgacattcagacaaggaaactcttgattttcctatgacacataggaaactatgtgtttcaggaaaggaaaaattggacatgaatccaagacattatttgtagtcttgcctaagtgcaagagttatgggctttttctagaacattattcataaaaagcaatatctaatcattacaaacactttggataaaatgcaataaaaagagaagccatgagtacacttggtgaaactgcagcttgagggttagccaacaacaggataaaagaaccagaagggaatgagatggggaaggcagaaggggaagaaagaacacaggagcacaggaggtgagagggaaaaggaaaattacatctctgtggttcaactagagagaggggagtgggggaagctttggcttagatatgtggtctaggtgcgatgatttcccaacagggtgtggaacacttcaaattaacaaaagaaaagtttgggaacattccaaaatatgtataaaagtcaaggacccactctgttcctggaggtatcccagggattccctggtccatagcattcacatctgaaccatactaaaagtaaaaacggtcatcgtactagaaagaaagcaacccagatttgagtgactgactgcctccccaactcaaaggttacaagaccctgtcccacttcaggctctgatcaaatgtgtgctttcaaatggaaggagtagaggggaactcgagcacaggcagtccctaattacccaccattttctatcactttatcaaggcaagatttctcagtaaggcactccacccaggttttccaatttgagccccccccccatgtggatgctatagctctgtaatacacaaatatcaagatatgcactcttactcatgtccagcccaccagtgcaccctgcattccatagctgaaagcacaatattggaaaggcaaagttagaccaggatgttttgttctcagtaaaaataattactgtgcaaaatgcactggtgtgatctgttgtggttcgcttgtttctccccaacttgtctgttcccaagtgaaaactggtgcccctgagcagctactgcagccaaccaagggtttactgggttgccctaaccatctggagataaattgattttttttacttcaaagccatgactgctgagcgcacatatttcctagaaattgaaagaagaaaacttagcccactttgaagagaaaaatgtcacttcctgattctgcctgcattcaaaaacatttctgtaggacatgggtgtctcctctcacctcccataattctccacacatccagtaaaatatgcaggccagattgcttacatgaaatactttatcagtgagttcataaagatctacttttcaaaaacaaaacaatacaaagatttctactaaatatacttgtgatcctagcactcaggtacctgaggcaggaggatgatgagtttgaggtcagcctaaactacaaaataaataagtgaatcctgcctttaaaataatataaataaatacatttaaagataaataaacaaggaacaatcctcagactctgagatttcaaaatatacttagctccgcccttgccaccttctcacttcctcctctctagaaaggacactgctatatccagactcgttctacagtagttatcaggcatccattctcaggggagtgtgatagtttctgtctgttctatttaaaagacactaagggagttgttgtaaaattagcaaaacagtgaacacagatattcatgagtgaatgacccaaaattggagttcacaaaatgctgacaagttgccaaatacataaagtgatcattggtaaccagaggaagaatcaggctacaaacctaaggagggaggtgtattgttaattggaagtaaaggtggagaatatcggagcagcaacttaaaatatgtacacacaaataacattatatggactgagcagattatatctctgtatttaggaagtgtgtgtgtgtgtgtgtgtgtgtgtgtgtgtgtgtgtgtgtgtgtgcatgcacatgagcatgagtgtgtctgtgtgtgtggtgtgtgtttaacaatcaaaggaaaaggccacagggttggaaagattttctagtgtttaaaagcacttgatgctcttgcagaggtcctggtttcaatttccagcagtcacttgttggtttatgaccatctgcaattccagtctgagtcaatctgatgcatcttctaacctcctcaggtaccagttatgtatgtagtgcaaagacatgggttcaggtaaaacacttatacacacaagtaataaaattaacacattaattttttaaagaagccatgcatttgaatgaaagctttaaaaaaattaggttaaaaaatgtgaactgcaagagatgcaaaaaagagcctctaattttgcaagaaggatactggtcttacaaaaaaatgagtcagaagaggttattaggtatggttagaataaaacaatgcatctgtagtaagggaagaattcagtagcatcagaggctgaaagtgagacttaaagggaggtaagagaaacctttcagatgatacagccaggatactgcaagcaacatcagacgctgacagatttcaatccagaaggggaagggagttgagaggcttactaagagttggtaatggattccttcttattgaactagtacagaagccaaaagggataacaacttttcccacaaaggatggtgcgtccgcatgagttccccatgtgtgcacacagcattctgaatcaacagttaggagtaccatcttgtgacagccacttctttaaatgagctttataccagcctgtccataaatgcaatgcaataaaggataatgtttgcctctcgcattgttaccttgatgatgagatgatgcttgcctcgctcgttgttaccttgatagtgtcctgcacatagactctccatgctcagtgatgattcctctccatgtaccatgacttatcatcatgggagaccctttcctcagctcagcacatgagtgcagtgtcaacagctttctgaaggacagtttcaaccatttgagttttccaaccctaccctggaagaggttggggcatgaatacatatttagtctcttccttctatacttggctttcccacttttatcgttaattctgtgtcactgaaaattaaagtatatttctttcttttttatggttttagcgctttattatagaaaaggagagagagagagagagagagagagagaagcaaagggcagccatgaccatgtggagagaggggggaagggaaaggaagaaggaagaagagaggtgagagtaagagagacaagagcttaggagagacaagagcagtatatctctattgatgcaagttctcactaaatactctagacttgccccaaactcagggtccacctgacattgtcttccaggtgctaagattgcaggcatgccctgtcagcacaggctgaaactatatttgttttttttaacatttcagtatttccacttgttaaggttggctgatatcctaattctccagaatggcatgctttcaacaatcctcagtcatttcaaaatgttatatatttcaaagtgtctttacagcaatcaaattgtgcatttctatttttgagttcctctgctctcatgagcaaaaagagtgatgagatctaatatgcttccttctttgccatgatgaccgggacacctgtagatatatctgtcatactcaaatacatttctcaatacattaaccttactctttccattcagatctctggctttatgttaatagtttccatgattacctgtaaatttattttaaattgtcttaaaactcccacatgcaatttaaaaataaaaatgtatgaattactgagagcatctttgtatttatcttcaaatttttctctacccaacctttttctcagatgctacattctttacaacagtcagccttcataatatacctaccacatagctcaaagaaaatctttttagatgaaagcatagattagcaagaaaagcattcacaaggattttataaaggaagcttcaacctttctctgttattcccccaagtcttcttgattattttgccttgatttcattttagtattctaaatcatgtatcagaaaagtctaaaaggatgataaactctataataaaagagtttaagactctatatgcagtaaaaaaattttagattgtataaactataatgtccttattgaagctactcatctctaccattatagaaacatccacagaaagtggataagcaaatgttcatgattatttcaataaaatattattgactaaaacaggagattgccagatttgaccatgggccatatttcagtgatcttgcttcaaatctatcactcttttactgtgtcctctgaataaatgtcgcattgtgactgaagtctaatgtccaagttcattggacaacattgaaggctcttgggttaaggggacaaacagtccctcctcaaaaggtagtttagctctgtgctttgttacttaaaacataccctatgtgagtttgttccctctcaaatataccacattaaaaaacaactttttattacacagtcttgaagtgtggacactatgcccctccttagaattgggaacaaaacacccatggaaggagttacagagacaaagtttggagctgagatgaaaggatggaccatgtagagactgccatatccagggatccaccccataatcagcatccaaacgctgacaccattgcataccctagcaagattttattgaaaggacccagatgtagctatctcttgtgagactatgccggggcctagcaaacccagaagtggatgctcacagtcagctaatggatggatcacagggctcccaatggaggagcaagagaaagtacccaaggagctaaagggaactgcaaccctataggtggaacaacattatgaactaaccagtaccccggagctcttgactctagctgcatatgtaacaatagatggcctaatcggccatcactggaaagagaggcccattggacacgtaaactttgtatgccccagtacaggggaatgccagggccaaaaagggggagtgggtgggtaggggagtgggggtggatgggtatgggggacttttggtatagcattggaaatgtaaatgagctaaatacctaataaaaaatggaaaaaaaaattcagtctactctataagatccataaaaaaaaaaaaacaactttttattacacagtcttaattcaagagaactatagatactaaatcttcttcattttattctagagatatctgcatcctcataaccaatagtaactttagattccacagttgtaactgagcttaaatagatggctcaaccaaagcaccagaaaaatagtgctcaaaccagcacttcccaacaacacgatgctagagactgcgatgctagagactgcgtgattcctcttcacttttcacatccacatagtacaacagtagtattctcatccaaggatatcttggatgctctttcttagtcattctaccactgtttgtcaaatgctcccaggatagtctgaagtacttttccaaacatgggtttcctgatgtcaacctgagtatctgcttcagtagccctttaaggtttttaagttaagtcttctagtgatgttaatgctgatggtgctgagtcagagaccatcccctaaaagctcctactttgtatgataaattcccaaagcccatactattaggaagtaatgaaaggtaggaaaactacagctgtgttgtctctatttcaaaatagattttactcatcaaaggatgagagattagcttggtttaatacactgtcaggtacaggaaccacatcttagcaactaatgttactttaaaggacaccaatggacaatctcactaggacatgctagagtggaaatatagtcaggtaaatataggaaatatagttctgctagtcaggtaagtaaggaagatagaaatataggaaaagtaaaggaggcagaaatccaccacacaattcttttgtgtacccagccctctagaactctcttgctccgtagccacaaagtcaagatgatcaatgactgagggttggtcatttatgggcctagatctaaatcatgcagataggatgcaaagatgaagagagcaagaacaaatggagtggctctgggactctagcatctcacaaggtaggcaaaattgacatgtgctcacacacttgtcaataagtagattcaggcaggtaattacatcactaggtgacgtggcctggaatctagagagtgtgttagtgggttgctatatagaggcaggttttactaaggagatggagccagatggcccctgttcagaaagatttgaaagacagacagaggcatagcaaggtaagagaaacattcaaggaagcctgaatgggttcagcatattttctgcaaagacatctggagaacagacagagggaagaagaagcctgtttctttcccttcccttgtgaaccaaatcatttcatttcgatctcaagaaaggggtgtgtgtgtgtgtgtgtgtgtgtgtgtgtgtgtgcactcgcgtacaagcacgcacccattgacttccagtgtcatccctcaagatccactgcccttgctttttgagatggagtctctcagtaatcctgaaactcgctgattaagctaggttaactggtcagcaaatctacctgtctttgtctccataacactgggattataagagcatgccactgcacccagcatttatatgtgggttttgaatagcacacttcggtcctcaggcttgatcactgagtgagttctcaaacccttcaggtcatgtcatctcagtgtctccatctccttccttgtgaaataaataatttgagctaaataatcacaagactccatatttcatgtatcatgtactgactctgggtcttataaagtgagcaatcagctaggctcagcctttctacctgaccttcctctgctccggccaagttctgctttttttttttttttttttaacatttcctgtgcagttttacctccaagaaggatttgaaaataactcagcaaggaacctgtaggatcctgccacatgcaccttgtgtggcttaggtagaaattgaaaagagcctgttatcacagggagttgactgctaggttgcctggaccagatcttgcaacacatgaaaagcatagaggaggtgaagacaacaggagtagggaatagggtgcctctgaaatttcactagcagaggatgcaaccacaaaagaagtgaagttgggcccacaaactgttagtgactgatctgaaaatctcaactgttcagaaggttctaagaacaaagggtgattttcccccttgtcagccctccctcctaggacaatgtacaatatgcaaaactgtaagtataagacaaacatttttttccactgcctcctcagccccatgggccttcaggaagacctgaactttaaacgaagcctttttatttttcaacacccacagcttccattcagcaatcagaagttttccacttcgatcaaaggggctaaacagagagggccaagggagcagccggttctcagcagctctgggcagattgccacccactccctgtccgtacctaccaaaggacaaggctttctccccaaatcaaacaagtgtacccccccaaaacactaacttgccttgccctatctaaaccagcaggacaagtggctaaggacaaatctgtcttccaaaccccaggctcagtttccttgacaaccagatggagacactgccctcgaagaagatactcaccagttcattcctcactacctatccctcctctgtggtttttcattttataaactcaccaaaaagggcctctagaccatctcctaagtctaagctgccttgcagaatgctcaaagagagatctacacagatccagaaagctaaataatctgagctgggctttggatccggcatttctttggggcttctgacatgtcctgtgacctgcagaggtagtgtatagtcaaaagagaaggtgctgtctacctcaagggaaatagcaagtgaggtttcagaaggccacatctggaggcagctctgaagcttttagagaatattctgaaagaaaggtcattcatagcaacagatacgatccagctctgtgtcccagaaatctatttattatatgaaattccagacatggcccagagggcaacttgggctgtttaacaggaattgttcaacaacagctgccaagtccattcccattcaggaagccctcttacatcatcctgtttgatcttccccatgactgcaaagcagactggggtgaaagcaggggctgcgttgacttattcaaggagcaatgctgagaagaggaaaggctaagatgcaacctgaggttttcagcctgtaaggaaagggtcccggcaggcttttggagccaggctggtttgcatataccaccaagttttaccattagattaacactggtagatttgattaagaatgcttttatgctgggtctcagttctctatgctgtgaagaagaaatactacttgcctctgaggctggtgacgagtgtgaagtcagcctctaagccaagttcccaagactgtacctgagccagaatgttcaattctagtaacctctgtccacaaactcatcacaaacacctggaacactatttgcacccccatacaacccacagacacttcacacactcgttccacagcactgagcctccccttcctgaccccctcactaatttcttcccctagtatgaactttagggcaagccagtttcatcggcaaatttaacagccctggagagcaccctgcaagagatagaggagctttggttcaacagcaaattatttccaaattcctcttctctcaccatgtctttgaaactatcctcaaatatcctactgccacaaccttgtctccaggtaggtaaatgcccaaacagtgggctcttctttcccagaaatgggtatgtttccagtttagagcatgctgtaattgttggacaaccccaacagtcattgtgctgctgacaaaggactgccatctccagggacccagcaaagagactaatctggaagcttcctgggccaccagcatggatcatgcagtgtgcagggtccccgcggcaaggcgttctgtggctgagcctaaaggaaacagaagtggttggtgtacactcacgcggaactgtctccttcctaccacccgctgacatcaaccatcgtctatctcgctacaatttctctgcactcagattaatcccaggcgatgaaaaatgaacctctcccccacccttgcagccacccttcgcctcacgcccccagagaagagtttctccatccggcaactggtgaaggcttttttccaagtcacatgatccaggatgcaggggaaaatccttcttggaacagagctgggtacagaaccgaatcagatgaggagagataaggtgtgatgtgggacagactatataaagcatggagccagggctgcaacaagcaggcagctgtggggctccttcccctgacccagccatgcaggtgcagcccggctcggtagccagcccctggagaagcacgaggccctggagaagcacaagtcgcagctacttctacctcagcaccaccgcactggtgtgccttgttgtggcagtggcgatcattctggtactggtagtccagaaaaaggtgagtaaacatcttttttctgcttttctttcctcatttataatgtgtgtcctctagaggaacagctctgggaagctaatgaatagtttaactaggagcaaaaaaaaaaaaaaaaaaaaaaaaaattttaaaaagtgaaaataagtaaaactatgcatatatagagagagattatatcagagaaaaggggaaaaactagaaatgaactttctgcactcagtgggaattttttaaaagaaatagaactggacatgagctcaaaaatttccagatgtactggagccaacagaagagctgctgaccttgagaagttaagattgaagcccagatgggtcacagcctcacagtatggagggaggaagcatagggagccctgatggcgagtgcgcatgtgggtatcacctctgtaaggcgctcatcctaattctaaggttatgtcctcaatccgtgctcccaggacttctgaggcctctcttttgccgagagtctgttgttgctattgtttgtttgtttgttgtggttgttttcttgcttgcttgcttgtttttagtgaggagctactttttaaagactgtgatatttgagagagagagagagagagagagagagagagagagagggagagagagagggagagggagagagagagagagagagagagagagagagagagagagagagagagaggccaagtcttcccagagctctgctatttcaatgttaaaacccacaaaagaaatcgaaagcttcctcacaagccactggctttgaagagttcagggtgttgaaaagtagcagtgtttttgtcacctgtaccctctgagatgcacacataatgtgcagggccacaccatcttgggaaatttcgtttgtttgaaatgggggtagggggagaaagtcaaaccgtagcttagaaaagtatccttgagagagaactcttacacactgtctggaaaggactgcgtggtcagctcacatgactcacaggcttggggtgagatccaggcatggtgatttggatactgtatgaataccactggtgcaacaccctgcccaagtgtgaactcacctaatttataattcttccaagttgccttggaccacagactctgcagcatactagttgctgaaagctagggccttacaagtatcagcaagtatggatattgaaataaagctttaaagctccttcctccttggcagtgtaagaagggagttattcacacttggcctgcagagctgatgggacacatcagttcatggatcgtttgcatcaggccaagaaggactcgcagacaaacctctgggcactttctcttctctccacattctctactttctgtcactctgattttccatacaccagatgtatattgttttgcagtaatggccaggcaagagagattagagtagcctgaagacatttgtcattcagaggacacaggcagaactgctgggtgtggggaagaagccaaggtggggaaggctgatggtggcactgtgcagaagcagctcccatccactgttgaaatgattcctcctgtgaaatctgcacaggcttctgccctgtttctgcagaggcacaaaatgaagcacagacaggggacagggcttacagtcaagcaccctgagcaagtggtacagtaggggctgcttagtggctcttggttgctctgtgagaatgctgttccctttgcttgccctgatggtggcagaaacattctcattcttctctcagagatttttcctcttgtgtctgttgatctgacttacctccgtgcctgggtatagaacggtgcacagtctgtgtgtaagctctagtatgctgtgatttttttttacgtgtcagatacttgctcacaagctagggctttccattttaatggctatgctattaagaatctaacgcttttcgcatatcgtttctagtacattatcaggcattaactgtggcaagaactggggaaaaatgagtcccctgggcctgggttattaagagtacatcccataggaaggcagatggggactgttacaaacaggtgaacttagcaactggagagactcagtaggaatctgtcaaagaacccaatgaaaagatccaaagagctcagactcgcattctagtattaaatatggaatgggcaatgaacacatggtgtcctccttgtaccacagggactgtgtggggaactgtgaggtttaccttactgccctatgtaggaccacctcgagaccacctgtgaagcagtagttccccagcagactgcaagaaaacatcactggaaactacagtatctggtcagagtgagaaatatgaataactttcaaggaatggaagagatgagaatagaggccccacctgcaccactgcagagatgagaaaagagatggagaagggagagttagccatgtcaggaaagtgagctgggatccttgagattttgctagaggaagaaatcgctatagtggagacaaaggggaaactgaggcatcaactcagtatttactgagtatctatttgtactgggcactgttatagacactgggtacgtaaacctaaccaaaaccttgaggcaaatccactccctgcccttgaattgtttatatagctttctagtgatgtctttgaaggcttctgagatagctacaattttgtttacatttaaaccaacaatatttattatgaaatacatttacgttgttcagcaaaactaaccaataaataagggtaaataaactagaagcccttcatgccttgtcctcccagaggtagcctgtctttgctgaggaagccactgtaaacagattcctgtgtgttctttgagaaagctgagtgtctacaaatacatagtgcacagatctcattattaagtccacctcattcacttggtgctttatcatagagatccatccatttctatatgtagaagtctgctttgtgccactgtagcatcctatctgattctcttgtgccgacgcctcgtgatttacctgtgccttgtaggacatttctgtctaggacgttttgccctttgtgcatatttacaaacaggtatgtgtaaacaaagacctagaaatgggaatagactgtgcatcttttcactcaaatgaatgttgtctatcagcattgatggtaacatcttgaggtagggaaagtctaccatcaagggaacagcttttcccagcactatgagaagaaagaaaagttgagtagctcaagcgcatacacacttttccatagcttaggaaagactgcagagtagtgatgaaagcaaaaggaagaaacacaatagagcttctcttaccacccccaggaaagaagaatccatgatgacactggtttcctaggccctttgctcacagagagctgttggcattataaggaagcctctgggccatcaaccgtagtcatgtcttcgcttcctaagccaggaggctgagcctacccaggcttaggaatgaacacaaacacagtccagagaggtatagcaagttctcaggttgtttgattttcaaatatcggacaccaattctagaaagagaaagcagctaagcctacctttctcgttcttttgtagggagaatgctggtaaggatagggtagggctgaggcgatttgggaggagccctgtttcttaaactcaggcaatcaaagtgaggtgaaatgccctgagtcgctttccttttcttaagggactccccgcatctggagttcattatttttaataatttgtttaaatatttaattttatttaattaagtgtttcaaaaaacaaaaaacaaaaaaacctgagatttctttcctaaggagcaagcactctgcagtgttttgaaggaaaggctcacgtccatgtgtgggacccactctgggaactctcccaacgtgagaaactaaagcctatgaaaccaagcttcaggcagaatactccagataggagaacgggccacctctgctgagggtggtgagcgtttgggggagtaactagaatgtaagctgaatctgagaaaatttagaaactgtcctttaattttttttttcaaaaacgatatgctaaaacccatataactatccactaaatctgtcaagaatctatcacattcatgctgcctctgtacatatatgaaagtaaggtatgggcagggtggcttcactcacccatattttgcaagagttcacggtaactcaacaatgttgcctagtaacatacaacacatacagtccatgttccatctccccatatcttctatggctgggttttttatcgttacttgggagatctaggctcatataccacctgctgtgtgatatctgcatatgtgttagtcgaaaacatttttttttttcaatttaatgagtagacctatctggttttgtgtctcatatctgtgatcctagctattctcaaaggtaaggcaagaagattacaaattcaaaacctgcctgggcaaacttagtgagaccctgtttcaaaataaaaaggtttaaagggctagggatgtagttcagtactggggtgcttgcctagcatagacaaggcttgagttcattctccaataccacaagaaaataaaattaaataaaataagaaagcaaaccaatacatggatagtcctgctaggttgttagaaaaagattagagtttgagagatggcttagtggttgagctgcttctaccatgcatgaagacctaaatctgcatgttcagaattcaggtgcacagcgataaatccattgttcctagacaaaataggatttagggacaggaaagtcacagagcctccttatctagctggtaggtagtgaacacagaagtaatcaaccaaaggacagacatgacagaagctaagaactgatatctgaggttgccctttgaccaccacatgtgaatacatacatacatatatatacatatgtgtgtatatatacatatatatacatatgtgtatatatattcactcagagccatgaacatgcttagacacacatacccacatacatgatacacacacacacacacacacacacacagagagagagagagagagagagagagagagagagagattaaaacttcccagcttccccccagagctacgagtcaaaccaacattttaataatcttcccagaataataaaatttgagaagccatgtgggaactgttacacctgcccttgattgttggttttgtggtattgactatgttataattctttagtagaacaatctacattctaggtctacctggggttatctatgcttgatattattatagcagctagggacaaatgtctggttatttatagttatatgtttagatacctcattaaggggacaactagcaacattttttcttgtcatgaatatgtaatctgtggtgtaacactctcaagacatgaatgtcttccactcagcagactggcatttcttgatgatccttatctctgaatactttattaccctgaggattatgatggagggttagtagatgctgtcatccttttgactcactaactatattcttctataaagatgagctctccattatgataatggcagaggtaggacccatcaagctagacaatgagtaaaggcatggcccagagaaagacaaattggattgtgagagttactagggtatgaacaatggtcagactacagagcaggccaagacataccaggaagtgagactaggtgaccacattcattgatagaggaggcccagagaacaaagtaccaactccatctttagagcaggaagagttcttaatctcacaacttcctgcagcaactttccaagactataagacctacttgcctattacaatacatcttgaagccagtcctactctaaaagtagctagtggatcagacatgatagcatggccaggagactaactacagtcagaatacctcagagcctatcctgaattcctgaatcagaatagcttttttcatgacatgttgcaagttggagaaacactggttattccactgttccaaatcccagacctgccaaaccaggagttcctaataaaaatactttccctaggggggtctcctatgactgccattcactctcccatttggtcttgggggaacatactgctgttttgtctgccttaatcgagagagtcaatgctatggagttattgatcttcataaacagtatggccaactttcttatctctgggatcttttgtaatgattaagtcatttctctgtgtttagacaactcttaattcttgaagtccacttaatgaccaatacaataaggcccagaaaggatttggttcccagagtaacctggattaagtgtttagttgtcttaccttagagatagtagagatctccatgtgctgtgacctaccttctaagacaatgaaaatcagaaaagaaacagatgtgaaattctccatagaatattccacactttagttgtcttggtaagtgttagtaatagaggacttagtttgaaaagcaaatacaggaacttacacacatttgttccatgccctccatttcattgctctaaaagcaaacagatctttcagcgaattaaaacaaactgaacacattataagggccagagcagttcctcttaaacagctactattttcaaacaatagctagtcatttacatgccatatcttgttatgtctgcaatagcccagagtaagaatcactggccaaagctctactcacagtaactaagggagagaaaaatacagttctaggctactgattggcttcttggagggttgggggggggggtcatttcacctggagggaaacagactgtgcatggtcattctttccattacacagaaagaactctagtactgttggaatgtccatcagatggcatagaagctgaaagaaaagagaaagtatacttaaggaaatgaagcagggtttggtaaccatggtgattgtttttccagagctactatggagatgagatgacagccttggggaagccatttgtttgcatctaggtcaagcctgtgtcctaccttactcaaagccaagcccttgagcaagatagttctcattttgcccagccaagatctcaaattccccaggcaaggtttattaaaacagtttacagacagcactcagcatagcgcctccggtctaaacaatctgacaaattctaacagtcgtcatcttgtctcataaatgtaagcagtcaccatgtcctaaggccttgcttctccatcctcaaataaaagagttgcttgagaatagggagaagagagcaatgaaatgcactgtccttggccaagtgaaaagttcactgaagaattttagtccagaattggccctagactctagtatcttggcatccttccttacaaaatcaacttgatggtctgtaagacatctaggtttgtctcttgctttgactatggaatcacatctgctatgagtagccagaggaagctgtagagactttgtgttcttcaacatagaaacagtcaaacttctgtcctgaattccctggactttaggtaaaagatgaagctacaggattccctgtcagtgcttttgccactggagaaatagaactctcagttgacaggcaaaaacaaggttttcccttctatgacaccatgccattacatacatttaggtcctcctcccagatacacatcttctatccttgatgatcaaaggttttctggaagtcaggggcatcaacatcacctgaggacttggagagataatggcaacccaagctctacccaaacctgctaaataaatttgcagcctgaggtcctcagcactaaagcttcagaaattctttctttactcactgtggtcctctcatggtgtgtgctacactcagtattctcattccatattgatttgtgtcttttcaatggctgttttaatgaaccaggcccatagcatatctttgaatgagtgactcaatgcacaccacagatgatccaagactgaacgagtgattctctagcatttctaccactgggatggctctgctggtgttgctcttctgctattcactctggtctctagtgtctaagaggatgtggggctcttggtactttcaaccatgttaggcttcatctaaaagacctttagttgtgtgtttgcacatcatgctaatcaaaagtcatgcttggcatcaagccagctgcttaatatgttttgaagcgctggctgttgtctcacaaaggcagcataaaggagaattttgtgatgtcaggttttcctaagaatcatatgggtagtcatgcaatcacagacgtaaagcactgttacacacattcagaactctaaggaaataaggcaacacaatcggaaaacaagcagaggggaaagtatcttccaaagcaacttcacatctcttccccctaaaaaactgagacccaaagttatagactttcttcagattagtgtgacaccaaagtttgtattcctgaggcctcttgagctgtattcctggcaagccacctcttggtctagagaagagacctactttgccgataacaatgtgtccacagaaggagaatgacagagctcttggggatataaattaaaatgatacatccagatagtcatcagctcttgcacataacactaagaaagtcagatataatttgttgttaactttcagctttggtagactttgggaaactatttttccatgaaaaattcatgaaaatgttcacccatttctagtgtatataattatatcagttaagtgcactagaggtgacttacttataccagtcaaaacataaatgtggcattccattcctttgtggaaagctacttatatgcctctctaggctgacatgtgaagatgtgagggacattggaaagctagtctctgaggaatctgttgggaaccagtgcccctccatctctgtgggccactttcacagaataagctaactacgtttctctttagtcccctctgacagtttcctcttcaacagacaatgtttccattaacctctcattcatttacataaaatctatgcagacatttatgattattatagaactcatttgtaatattgtgtggatgtatttacaaatacacctctgtttgtgctacatatttatgaatatttgcaaatctatctggccataagcctgggataaatccacgagatcagagacccagtttacttatatcatcccaatgtttggaatataaacattaataaaaacatcacaatttccaaccacaagcgaggtagaaagttatcttccaggtatgcttacaacacttttagatgaaccaaatatggaaagaagaaagtgtgtacatttattctgttcatttgatcatatgttgacttaaggggaaaaaacagtactgtgtgtggagaggaagaaagctcttgactgggaagtggaagttccaactgtggtactgagagctacaagctcgctgtgtgtcccgggacaagccttcctgtcctgtttcttgtatgtgagatgtagatggtaacccctatcttgtgtttctcataaacagatgggctggcatggatatgaagcccactatactcaaccaatgaatgagtattcaacctttaagggtcagagggtgggtgggttctaaattgcacagtgctttggggactcccagggtgaaaaggaagataagttgttttaatcagtgtcctcaccctgcccttctctcttcccttccaggactccactccaaatacaactgagaaggccccccttaaaggaggtaagagctcagatttaggaatgaatgtgtagtgaatcatgcagatgacaccacaaggtgtgatgcctgcttatcaaccggcaatgctgtgactgtccccaacaggagtgggacaggtggaagtggggctgattgagatgagctgatacttcggactcatctgggtagcccctgatcactgtgctaatccacacaaccctccctcctgccaggaacagtctcactaacaccattgctgtagccaagctgtggaccctgatggggtccttgtattttgagctggaagccctaaactgaacaaacttgcgtatgactcttgataccatttcgcacatggaagtctctgttacacatccattaaacacagatcactgtggttctagacgagccaatcagggacagctcataactgcttggcatgaaaactggtgtaaactattggtcaaataactggtcatagccaaaatacttaatgaagtttaagacctataaaaacagacttcttccctctacattaccagacacagaagctattaacatattggcctctactaatccctaaggggatatatgcagaggtcagttaacactgaagattaaactcaaggttatctgactagtttttttcatgactcagagaaggaaaaatcagagagatgaagtatcttgctttgatcatacaggctaaaccaaaaggtccttgactctgactcagtctttatattcgaaacatcagtctccaccttagctccactcacaattttcagagcccaggtaccaagcacagctgcctgagcacagaactggaagaagatggggcgggtagatagaccagggtagagatgctgggcacctttgggacaagagggtacaaaagaactgacacagctccttatagcagcaacacatttgaagtttcttcccttcaggacaatctactgaagacttagaatgtatgggcaaggagccctgggtagacaggcagccttctgaaccttttaagattgatgaataagctcaatattggccaaaaacacttagggccgagtatgtggtcttaattccctcactttgtgtagataaccagatatgcagtcaaagagagaggtaaagttagaagggcacagacactgcctacaaagatttagatagtaaatattctaggctttgcgtgccttggctgaatcagtcatgcagttaccatgattgagacagcctgaaaacacccaagtctgtgagcgtgactactatcccctgggcctcacttacagaataaacaatggttgggcttggcccatagactggaagagcagactcctgcggtacagggagtgtaggctttggaggtggacatcctcgctaacttgttgcatatgttcctgtggagctttgcaaggagcggcatgcagtgattaaacttaattcctccacctctccttccattgtcctgccaccaccccgacttagatttttctaggaaaaattggaagttttcatttggcaaggggcagtagccacctcccatagatataatgtctgtggtaaagatagccttgattcagtgtcaggaccccagccacactcactagctgttctttcttggttgtagagtgctccaaacattggtcaccaagtataaagctcttaactagtgggttacactgactagttacagtgctagttaactagcactgaccagagcctaggatgcagggctctgcacacatgctaagcacaggatatccttagatcacatgaaataaaagaaaacaaagaacaaagttgtcttcttgacagctgctacgttacacttaagatgaaaacactctttctgggaaagcatatcccactgtgctctggtgttagactgcccctcccatcacaggaagaaagtgacacagatgctaggttggctttgtcatgtattctgttttcatgatcataagaggcagaataaagcaaactttccatgttactccccggtttttcatttgagggaacaacttttgttcatgaaatcccaagtttgggaaactgtgggtttgaccacttcccagctccctcctcacctgtcccttgactaggaatatccgaacaagaactaacaccaacaccaacaccaaaataacctctgtctttaattcaggggttcgacaactagattctattcgtcaatgctgataatacgcctcactaggaatgttaaatttgccttaaagacttttccctacttcctttgggttggtctgaggatcagccttgagagttatcagtacggggtggagggatgggtgtattcccattgacattccgtttgcaggtaagtttctgagatccgggaagtcagggggacttgttaaaggctatacagaagacaaaagagtcctgcaaatatgagactccaaggtttcctctgttgcccctacttcagccagcaccctgctgtgcatggcccctaactcccacttttaatgtacatgcatacttaccttgactccacaaattgggggccctataataggatgagggagaaaaataacatctgaggccaaaacctggttcccacaccagcaggaactggtgtctctttaggaaaacttttctcccctctgaacatcactggactaaatatactaaattaattcaagttggagctagaaagaatgcttcttttacaagcctgtaggcaggtaaatgcttgctatgcagcatgaaagcctgagtcacatccccatcacccacataaaaagcaggagcagttgtatataccaataatacaagcattgagaacacagaaacaggaaggtctctgagtctcactggccaggcagcctacccaaactggaaggctctgggatcagtaagaaaccttgtcttaagaaataagacagtagggccgggcggtggtggtacacgcctttaatcccagcacttgggaggcagaggcaggcggatttctgagttcgaggccagcctggtctacaaagtgagttccaggacagccagggcgatacagagaaaccctgcctcaaaaaaacaaaaaaacaaacaaacaaaaaaaaaaaccccaaaaaaaaaaacaagaaagaaagaaagaaagaaagaagggagggagggagggagggagggagggagggagggnnnnnnnnnnnnnnnnnnnnaaagaaagaaagaaagaaagaaagaaagaaagaaagaaagaaagaaagaaagaaagaaagaaaggaaggaaggaaggaaggaaggaagaaagaaaggaagaaagacagcaagcaattgaggaagacatactgtgttgacctctaacctcacatgtatgcacacatgaatatgtatgtgcacacacactagcagagctctttgacacttcctgagactagaattctcttgtcctatatagaaagagagaaagaaatagcctgacagttgtctgaagaaaatctgaagccacaatctctttcaccaacaaactaatcttaagccaacacaagaaacaaattgcccttttgggaaaggaaaagaagcaggcagggaaaaagagaacactgttgcaagacatcccaggcagggcagacctactttccagaagttcctgggaggaagtcccagggatggcatgaggtttgtcacaaggacagaagctgcaaggattgcagctaccatgacagctgttgtaaccaggaaaccagcactgaccagagcctaggatgcagggctctgcacacatgctaagcacaggatatccttagctacagggaaaccacagaaaaccacacccgtgttagtaatgagccctaacacaaacttgtcattcctggccagaataggacccagtcaatggctgacttgcactcggcccactgtgcttgaggcttgttagccattcagttgaattcatggacaaactggaaggctgggaggcaagcctgtcctgtatgcttcgtgctgggttttattctctcctctagcagacagaggtaacatgcctcctgcagagaaccaccatgaacatgaaatcaagccaaaaatacaccttcatgttcccacttggctggacctcagagcatccatctggtccactttgctcttccatcttccatgaaacagtctgcctcctccacatacagcttaaaaccaaggctcctgcatcctcttgtcatttcttgttttaatgttttgcttccagtgagttttgactctctagtgttgctcactactgggctcattcgtccaaatctcagattatagggctctttacctggatttcccaggagtttcaactactgccctgggtctgcttttccccctccagaccccaccaggcaccgttcctcacaaggctggactggtaggaatgaagcttagccaaggcaggtaggttagacaggatcttgtactgaatgagatcaggagaaacagccttctccagagacagttttcagtgaaacagctctctttattagggaagaacaagaactatctaacccttggggcatgggtaggggcttgcagggtgagtgttcatctttggctggggcacaagtgctggggaatgtttcatttgcataaagaggaatcccaggtgcttgtaggacatatccttataagggtgagatgaagtttaacctataatctggccagcaggctatgtgacaacctcaatggtggtggaggtggggggtcataaggcttacattgcctggccgtgcaagcccagagcaaggaggaagcagtcctactcctgcctgactcaagacaagattttcagggtttggacacaattcatcctcactcttgctctgaaccagctcccctggtcacacagctttccagccccatgcccaacaaaacctcaaatctttgtataccaatatctgcagaaggatgtaagatgtgcagaaatgctgtcaggacaaaatggtacagtactgtgcctcccagcaggtggtggaggcgtctggggttctcttttgtaaagctgaagatatttcagccactaggaacttctcaaaggctagcatactctgtcaccaagttctgggatggacagagagggccactggtgctttgggacaggcttgagagggtcatgtgacctggagtgattccatatcctgtcattagaaaaagttgttggtttgggttttttgtttctgtttttggttttggttttggtttttggttttgtttttttgttttgctttttttttaacttgtttattttgctttggtttttttcttgcaaatgcttatgtggcccatggtacccagaggtccttaatgtcctgaggatgttcataccgtccaaagctaaaagggaaaaatgggcatcaaaagaggtgaaatgaggcaggctatatgataaagaaatactgagtgtgagaaaaccgtacagccagggagactaatttctccccagtattttactgacccaaatggtctatgaccatttgtcatatagaagccacactgaaggcacaaggaatgacagtcttccttgtcctcacactcccttcccctcagaagaataaacactggctggcagagtcttactctgtcagtggaatggggctggatccagaatatccacgtctgcagttgttactcctgggttccatttttcttcgtcccctttgcagcatcatacgatgctttcccatggggataaattgcttttcagccggtcacatacttcacttgccacaaggaacctatttgttcctccagtcaatcttaacacactcaataaaacctgctcttaaacccactttcttttgctcaaggcagagataagaggaattaggaatctctctgtggaaaatacccaggaagtgagccattctgaatgatgtggaatggagtcctgcataggctatctagcattctaaagccacaactcctaattttcatacatacccaaaaaagaatgaggaggcaggagacaacatgaggtataggggagaggagagaacacaaagaaggtaaaaaggtttccatttgatgctagaattgccagatataattcccagtctccagctccagaggatatgccaacttgcctatcatcctgcactttaagaggatggaagaaggagggaaataaagggagaggaggggggaggagggaagaagggtagatagtactagacctcaaactggttcctttttatactctgttcaagccccagagacatctgtgtgccaggcaggtaacccaggccccagaccagagaaggggagccactatttggtattatttgtgtggtatgcaataggctcagtgttgtccattattccatttaatcctcttgcaagcggttaaggtggatgcgctcactttgaggaagaaggagcaactcggaaagtctcacatactcggggtaatccgtacaagcagtagggaaccagggtgggatttggactcacacgggtctcatatcctgagagcgcttctgtgcttccgcactgcaaatgagcggtggcacaggaaaggccatttagaatgttagaagagtcttacaatgtttcttaaacagccccaccaccaactgtcaggcccatcagtctttaacatgcattacctgcaatgaagtgccctagagtcagatgtgtttaccttactaccacaacaggtcagcacttccagctcccaaaagccttcacagtattgatgtggatcctaacttcattttaacccatttctgttcattgttttctctgtgttcaacaataagcatgctgtctattagggattttttttttcaaggaccgttgtgaatccagagtctcccttttacatatgacttctcttgagattcctgtctatatcataaatattcttggcctggtagcatcaaggaaatggttagatttgaaggaatgtctgtgaagtgaccctttgcacaatgcccgccaggttaagagttcccattgatcccaaattcggctgggaatgaagattcctctagatgtcgctgttgggactttccctgggtattcattctccagggaagaagaaactaaaacgtttcttctgtttcttcaaagattaagatatttccaagaggtcttcaccctcccctcccccacaaaatcagagagtctcaaacaattgtgtagagaactgagaaaacctactctcacaggcgatacagtgtttcatccctccccgccccaccccttcaaatcagagagcctcaaacaattgtgtccagaagtgggaaactctactctcacaggtaatacagtgtttcattttaatgagcatctcgttatctaatcctctctgtatggcatcacagagctatcccaagaaaacaagaaaaagagacaaaaagaaaagcgacctcacattctcagagtcacggctagccatgtgctgtgtctgttactagacatctgtaatcttaatgtgtgtcatattagctacgcatctctgttgagtgtcactgggtttacttcactggtacagtaaggagctgaagttctgggagaggaaatgacggatccaacaccttcactagaaccacatgttctctgagaagcaccatctgcccggtccttataggagtcgttctgaagaagttgactaggtcacaaatcatctgactcgaaagccccatttccctgacctgtgacttgacccgggcactctcccagactcaggatcaggaaggcaccctgaagctgctttcccagcaacgtcctccagctgtctcctgaggcttcagtcccgggtgtgtgtaatggctacagactcatctctcctccctttaaccctcactgctctagaatgatctagaaaggcatttctacatctcagtcaacaatgttccccatctaaataggaacgctaaaatctgaaagagaatattccagactcccaacatccaaacatcaactaagcctcttctctcagaataaacccctccagactcaggcactgaggagacagattgcagagatacagtctagatgctcagtccacaaatctctggagccacagcaagattcctactgcctggggcacctatacaagtcttcatatccacaatagactatcttatcatgggttcacaagctgatgagacttgagttgcatgactggtaccccacaaaatattgtctaggtcttagcaagatccctgtgactttcaaagcggccagcccactttttgaacagcactgactggccaaatattcaagctcccatctctgtgacttgggttataacttgggtgtccttcttatatgtctgccccggaaaccatgtgaggaaaaggagatcagagtggtgttagttgtcagctgagagcattttaagccttcagaagccactaagactcttggggtttgaaccccaccacgcatccttcactcttcttttgctgacacctccaaaagtgaagtaacagagatggcacccttctccaaggtcttcttccagctcaacagtgtcaatctctcaatacccagcccctccttgaaccaactccagcaatggcattcttagaaggagaagcctgtgcttagtcttaagcatgaaactatctaatcaattcttgaagaaaaactacagtatgcctgccatttgacttcaggaaatgcaaatgcttcaaaataaggtagactttttccatcattgggtttctcagaattacagctgaggtcaccccactgtacacatgaagaccaaaggggaaaaacagaagaaaaaaacgcctgcatgtgtgagagacaagcctgggcttgtacttctgccaccatctgtagatgctcagctctggcagatatcaccacaagccacctgatacagagggaccttaggactagagagatagagcctgtttttgatgtgacatcctggctttgatccagggcatgaatcctacttttccacctaacttagaatctgtgagagtcaggccaatattctccctgccaggggaaaaagcaagcactccttctcactacactgatgcccttagcactggtccagccagagctacagaaggaaataagagagatggtctagttgactccactcagcaaatgcatcttcttggctgatcagtaggagagactaaacagtagtctctgccaggatgtgttttaaaggacaactggcttgatagaggcagggcattccacttgacaggaaccagaggtatgcaggtggaagcatatccatgtagttgtgtactggagctgcacgtctccaaacttgtgtagagtggggggaaatccgtttgggcattagagtcacactgactgagttttgatctccaccctactagcaactagatgtgtggctgagaacaagccagttaaccctttcttattcatctatttatttatttatattccaactgctgcaccctcatcccattcctccctcacagagtccttcttcccatttcccctccccttctcctctaggaggatgctcccccactcctcacccatatatcccctcccaccctggaatatcaagtccctgcaggattaattatgcacatcctctcctgctgaggcaatacaaagcagtcctctgcttcatacttcatacggcatctgcatctgtttcagtcagctgccgggtagagcatctcagaggacagttatgctagactcctgtctgcaagcacaacatggcatccgtaatagtgtcagagattagtgtttacccaagggataggtctcaagttgggccgttattgtttggccatttcttcagtctctgctccatctttgcccaccctccagttaaacttttaaaacctatagtttctaatgtaaataacagagataactgtaaactatctctcatgggatgattgtaaaaattaaatctcttatgggatgcttgtaaaaaaatgtaaaaatgaaatcatggctgtagcatgctcagtaaaacattacagaaatagtcaacattagttatgatggtggtagtggtgatgacatttattactattaagacacagaataaaatgagggagggtatgggctgatactggagagattgggaggagtcaaaagcccatcagagctgtagggaacataaattagaaagtgattcacagcaaagagagtccgatttgcatctctctggtttcttttggttgatgttctacagtcccaaagatgagattggacaacagtcacacttccttagactattacactttgggatcaaatttctggttatacacatccacgagtatgtgcagggcagcaacaagcctcacaagaacactgcttagatgataattatgggctaagatctagagagtggaagctggccttcagcctttgatgggccagaagccccgtgtgagtccagaacagctagagatgaatactgcccctacttctgctgggggttcctctagtagtgagcttgctcagacagcagagggaacccttcactcagcttctagctgttctcggggccccagggtctttctcgaatgaatctggacaataagataaaggaagtaactggtagtacccatgtgtctctgtttagtttctgtttccaggatctgtccgttggtgagtcgggtgttgaagtctcccactattattgtgtgaggtgcaatgtgtgctttgagctttactaaagtttctttaatgaatgtggctgcccttgcgtttggagcatagatatttagaattgagagttcattttgtagatgaacttttggtagatttttacctttgatgagtatgaagtgccccttcttgtctttttagataactttgagttggaagtcaattttatttgatattagaatggctactccagcttgtttcttcagaccatttgcttgaaaattgctttccagccttttactctgaggtagtgtctgtctttatccccgaggtgggtttcctgtaagcagcaaaatgttgggtcctgtttgtgtagccagtttgttagtctatatctttttattgggtaattgagtcctttgatgttaagagaaatcaaagaaaagtaattggtgtttcctgcatggtactggtacagcgacagacaggtaggtagatcaatggaatagaattgaagacccagaaatgaacccacacacctatggtcacttgatctttgacaagggagctaaaaccatccagtggaaaaaagacagcattttcaacaattggtgctggcacaactggttgttatcatgtagaaggatgagaattaatccattcttatctccttgtacaaagctcaagtctaagtggatcaaagaactccacataaaaccacagacactgaaatttatagaggagaaagtggggaaaacccttaaagatatgggctcaggggaaaaaattcctaaacagaacagcaatggtctgtgctgtaagatcaagaatcgacaaatgggacctcataaaattgcaaagcttctgtagggcaaaagatactgtcaataagacaaaaaggccaccaacagattggaaaagaatttttaccaatcctaaatctgataggggactaatatccaatatatacaaagagctcaagaagctgaactccagagattcaaataatcccattataaaatggggctcagagctgaacaaagaattctcaactgaggaataccaaagggctgtgaagcactttaaaaatgttcagcatccttaattatcagggaaatgcaaatcaaaacaaccctgagattctacctcacaccagtcagaatggctaggatcgaaatttcaggtgacagcagatgctggtgaggatgtggagaaagaggaacactcctccattgttggtgggattgcaagctggtacaaccactctggaaatcagtctggcagttcctcagaaaactggacatagtactactggtagatccagcaatacctccccttgacatatacccagaagatgttccaaccggtaagaaggacacatgctccactatgttcatagcagccttatttataatagccagaagctggaaagaacccagatgtccctcaacagaggaatggatacagaaaatgtggtacatttagacaatggagtagtacttagctattaaaaaatgaatttatgaaattcttgggcaaatggatgtatctggaggatatcatcctgagtgaggtaacccaatcacaaaagaagtaacttgatatgcactcactgattagtggatattagcctagaaacctatcaaggaggaagaccaacgcatggatacttcattcctccctagaatagggaataaaatattcatggaaggagttgcagagacaaagtttggagctaagacgaaaggaaggaccatccagagactgcctcacccaggggccccatcccataatcagctaccaaacacagacattattgcatacgccagcaagattttgctgaagggaccctgatatagctgtctcctgtgagaccttgccagtgcctggcaaatatagaagtggatgttcacagtcatctataggatagaacacaggcctccaatataggagctagagaaagtatccaagagctgaaggggtctgcaaccctataggtgggacaaaaatatgaactagtcagtacccccagatcttgtgtctctagctgcatatgtatcagaagatggcctagttggccatcattaggaagagaggccccttggtctatcaaactttatatgtcccagtcaggggaatgccagggccaagaagtgggagtgattgggtgagggaacagggtgggggaagggtataggggacttttgggatagcatttgaaatgtaaatgaagtaaatatctaattaaaaaatgtggaggaaaaagaaagtaactgggagctcaggacatactactcagagacagtatgtaagctcggcagggcgtggctcctattgtatgagttaaaactgttagtttctgaaggatggactgagtggtcatctctggtgacatcatcaaaatatgtcaatgtcagattggagagtttccagttctccagatagggggaaccaaggcccaaagaagaggagatctgctccaaatacattgaatttgagtcactgcaggaaatgtataatttggttctttgcatacaaaatagcttgttataataagaaagagtgatcatcatcagtgatgatattaaacatatttttatttctctaatgctataatgacacaaatagcatgtttgtctctattaaagaagctccagatgggaggcttcctgctaagatgtcatcaatgttttgtcctcttaaaatttgaaggggatgtttttatctttgcagtctagatgaggcagatgtagggcatcctcacattcccatgtgctcactcaaccctgagtatgcccttgagtgtcttcagacataaaagttggccctgggttactctgagaaccaggttagctgatgctggtaaaagcagaggctagtttctgccaagcagaagatgctgggtagaaaaacctgcatcagtgttgctgttggagagactggtgttcaggctgaaggacatgggaggctcaatctcatttgacctatgggtggtgttcaataaaacctttcatgagaactctctagaacggtgtcccacactagatgatatttatcttctgtagtattctctaacagtcctagcagaaggaaactaaaactgtgaaaatcctaggctgtttaacagcaagatttgaaaacaagtttgagggattgttgttgtgattgttgttgttgttgttgttgttgtcgtcgtcatcatcatcatcatcagtggtgtgtgtgtgtgtgtgtgtgtgtgtgtgtgtgtgtgtgtgtgtggtgtttgtgcttaatttaacctcacaaacaggaacagacgagtaaatttcatctcagtgggtcacggaaaaagatgtagttgtttacagtccccaaagaagcaaacgacaacgcatacctgatcttcttttaggaaattgctcagaggatctcttctgtaccctgaaaagtactccatccaagaagtcatgggcctacctccaaggtcagtagccaaagctagagaatgatatcctcatgaggatgatgtcctatgccgacttccaatccagagtagagtcctctagttgaaagtgacatgtaaatgtgttcttagccaacatcatactttttataaattgaatttcaatgtcttagaggaagatgagagtttttttttttccaaagctacaaggctcttctctcaacccccatttgataggggaaaaagaagttggttagaaatggcacggttatcatatgccccagtacaggggaatgccggggccaggaaaagggagtgggtgggttggggagcagggcagggggagggtataggggactttcgggataacatttgaaatgtaaatgaagaaaataattaaaaaaagaaagaaatggcacggttaaaaaaataaaaaccatgagctttgagggagctgcattagggcccacattggaagcagctatggacaggtgggcaggtgttcacaagctccctcggctgctgggaaacacttcattcactcctctaggtttcctatctgtactttaaagacatttttgtcccttgactgcatcatgtcctccttcctctactacccccactaccatgcatggacttattagtttgggccaaatgcagtcttttcccgaatgcaaagaaagaacgactccatctctacctctatgaaggtattcacaggggaactacaaaattgcctggtccccagactgacagcttaatgggcttcttggtgcagggcctgtttgcatattgcagtgtgcttcagggaagagtcttttgtaaatgaaacagtaagaggcacttagaacttgaaagaatgagccatggaagagatgggcaagattctccaaatagccattttgctcatttaaaggaaaaaaaaatcttcattttgcagttacattagttcttgcctttcaattgaactgcaacaaggattgaagagaaagcattgaatcaattaaaaccagtatgccaccttcccagttctgaaggcacctttaccagtcagtgctaaatttcatttgttaggactcagagacttggctttcacacaaacacttttgcttagaggctgtaattctctgcttttctataatcctacgtgctgggtccctcactgtgcacatgaggggcccatgcaaggatgtttgattgcactttaaagaaaagaggctttcaaaacttcagaccatgttaaaaggtgtatgttattttttatcagcacatattaattgcctgcaataataagtttaattgttgatattttttatgaatgaacataaccaacttttattttatcttaaatacaaagattaatagacatactcctgaaaaactcaatactgaaattgaatagtattgtatgtcacagctctgccaccacccacaatgcatattgaaacattaaatgctcgttcattaacaaataacacaatagcatgacctttgtgtaaaatacagcctaggtggatgtggtctgaaaaagcaaggagctagggaaatggcataggcagtcaagtgactgactttcaagcatgaggctcagagctggggtactggaatctgctttttaaaagccaaacatggtccctcatgcttgcaatgccagtactgctaaggcaaaagtagggcgatccgtggagcacatcgactgaccagtttggcctactgggcaagattctggatggtgaaaatccctgtatcaaaaacacaagttatggagctggagagatggctcagcagttaagagtgttttctcttccagaagacccaaatttttttttcccaacattcacatcaagtgtctcaaaactgcctatagttccatctccagggtatccgatgccctcttctggcctctgtaggcacaacacacacacacacacacacacacacacacacacatacacacacacgctgaatatactcatagagacaaacacacatacacataaacaaaaataaacctttatttaaaaaaaaaacagaaacaaggtagatggtaccagtactgtgcatactggtacggtataaaggctgatatccaaggctgtcttctgggttaaacatgcacatgtacacagacaggtacacctgcacctgcacctgcacacatgcctggatctaacacatatagacatagaaacatacacactgaacaaagggtaaaaaaaaattaacaagtgtcaaatgatatgagataataataaaaagaaagtcatctataggagctgcctcccattagaaaattctctgtaaagtctttcgttttccaatacagtgttgtatgtgatccaaccctatagtctgagcattaaacaacgaaaggcagatggttttattcctgtgacttcctaagtatatataaaaaaaataagctataaaagaatattctagaaagggtacttcagaagatgtttaaatatttgggatggcaagtacccttctagaaaacagagatgctgagtgggaaccttgaaaaagaggtttccaagatgtacctaacatgtaagtaataattctatctttccagtgtcaaagcatctcaacaataccaaactgtcatggaacgaagatggcaccatccacggactcatataccaggacgggaacctgatagtccaattccctggcttgtacttcatcgtttgccaactgcagttcctcgtgcagtgctcaaatcattctgtggacctgacattgcagctcctcatcaattccaagatcaaaaagcagacgttggtaacagtgtgtgagtctggagttcagagtaagaacatctaccagaatctctctcagtttttgctgcattacttacaggtcaactctaccatatcagtcagggtggataatttccagtatgtggatacaaacactttccctcttgataatgtgctatccgtcttcttatatagtagctcagactgaatagttgttcttaacctttatgaaaatgctgtctaccatacagtacttcatctgtccaaacatgggccaaagaaaatattaggacaactcaaactaagcatgtgagttagtgcacttctctttctgtcctttggaaaaatacaaacccaggatttagaaagtggagtctccttcagatgcacaaacaggaaagaatgtgatatgtgcacagagacctacttgggcactagaaggggttgagttgtcccagtataaccactaattcactgaccttgagccatttttccttcccctggaacttggggtctgaatctggaaaagtaggagatgagatttacatttccccaatattttcttcaactcagaagacgagactgtggagctgagctccctacacagatgaaggcctcccatggcatgaggaaaatgatggtaccagtaatgtctgtctgactgtcatctcagcaagtcctaaggacttccatgctgccttgttgaaagatactctaacctcttgtaatgggcaaagtgatcctgtctctcactgaggggagtagctgctgccatctcctgagacatacatggagacattttctgcccaaattccattctgtgtgcagtttttaagtattcccccaaaagttcttgacaatgagaactttgaatgtgggaagagcttctggacagcaaacattaacagcttctcctgaccagagagaccatgcaagcttggtcttagacccatcaagcttgaggtttctacattgtgggagacagacttttgacaaaccatttgagttgatgtctgggcccctgggagttctccttcagtaaggagagcaagccgttctagtgctgtgtcagaggatggagtaaaatagacacttttctgaaggaaaggagaacaaagttccagaaaaaggctagaaaatgtttaaaaggaaaagaaaaaactcagcttttctcatatgagaggaacccagaaaaacaacactgaaaaagaagagtggctctgtcaacctcctcttaggtctcctcctctctagttattgggaaaggagttgcatggtacaggacaagttctggtgtgtggtcaaatagaatcagatgtggagaacaccatgcagagaataaggagacctgtcatatttgtgttgtactcaaatgaggggcaaatgaatcttaggctaaatcaaataacagtctctgtcaagctgtgctcagaaagtcaaccactgaagatggagggtgaggcacgtcatttaaaaaaagtgaaatgtagcaaaatgaaaacaaatacagacaatacttattaataagtcaactggagtgtaagtaggaagcagacagcccaggagtttgaaactaaactaatgatacttttaagggttaaccagcccctgtgggactttctagtacacctgtaataattatatttttcattgatatgacagaatacctggcagatacaactaaagaaaaatatttattttggctcatattttaaaaaaagatacagtccacaatgaccagaaggcaaggccataggaagatgggggtggggggtcacgttgagttcacggtcaagaagtagagagagatggactctggtatttatctttttctctttttcttcatttattcagtctgagattctagccaataagatagtgcttcccaccttcaagatggctctaccatccttagttgaatctctctagagacactagtacagaacaagctgggtgtatgtctcctagtagattccaaatcctgtgaacttgacagtgaagattaattatcaccacattcatggaagtaggcacatcattttttctaaccagatgcttaggctgcctgagactcatatttgcttagtgaaaattcagtgcatttcctcgtgaacttgaggaaaattgtgtgtaaaaagtttatgtataagttgatgaaatgttccacctctggagtgaggtcagttagccctggtggggttcctgttatgtagaaattcagggaacaccaatccctatccagtcctcaaggacttgcatccagccccctgattccagctctgctgttcctcatcaggcttctttggacatcccacagcctttgtgaaaagcttcaggtcacatctctccaggccacactgaagcggccccagcatccagggactccttggccctcctttgtgtacccctgccatttcgtctccatcttctatggatttggcccataactgagacacagaagagggatagagctataactttaggaccctcagaaccaaaggagtttgtgatcaatccaatactatttttagattaaaaataataaagcttattgtttaattttaacctatacatatatataggtgtacatgtatgtgtgtatatacacatatatgtgtatgtatatatttccagtcatgttttacatatctgcttagcctaggtcaggggatgaagcctgactcttgctttgggaattgcaaagcttgtatatgtttatatttatttttaattaagaagaaaatataatatttttcctaggcttcatcagcttatttaattattgttaatatttttccagatttccatctgcttcaactttttttaaatggagatagatcttagccacactcttccataccccactccctctccaagaagtcaaaactgctgtctggaagtctatgcctgccttccatttacataaatttacatttgttttctaataagaatgtataggacaattttgtgtgctttttatttttttaataaaagatatactttatataacatcttgtgacttccaatgttttatgtaatactaaagttttgaggtttacccagaccaaaaaaataaataaataaaaaacttcaatctagttctttcacttaaacatgagatgtttgttttgttgttttaatatatctctgcccattctcataaagacaaatattggattcacttccaaggtttcactgtcagtttaatgtattgataaaagagacttttctccttgtggagctcccacttcacatgttccccatagctgctggcttcatcatggccagtgagggcgtagacacccaataaccacgtttgaagaccagagcttagtcttaggaatctgaaatgtctttctgtctcttgtgagaactgctcttctctgtacacccagtcaacacttctgtcctgagctgcagttcacaacaagcctcatggtaggtaccagtgtgcaaccagttatggtgagtgaacttacaccatgcctttccaaaggattttggatcttttctagatttggtcccttttttctggagagtaattgaaaaactactggtcctaggtgcttttttccccccattttccccagtatcccatgggctgactatccacttttgtagattcatgtgacagttttcttccaattcctataaaaacgcatccctagcttgcttcagacttagatccagccatctgccttcaggagcctcctgagactctataatgaagactgacatgcaccagcttgtgcagcagttttgtccagaactatatcttttcaacccagaaaaaatatttcacatttgccaacaaggaccaagccaaaacaaaacaaatcaaaacaaaacaaaacaaaacaaaacttgtacttaccatctaaactatatgatactctcattagttatacagtgtattttgtaaacctctatcttagtatgaaatccaaacattgcaaagctaaaatatacttcccttaccctagtcgctaggactccagtgctattgagtctgagatgagcaggacttgggaatgtttgtccactcagtcagcaagcacaacactgaaaaggcacttgggttcactctgcagctatattgacacacgtttcagtgttcagttgctaacagaatacatcacggggagactgaaaagagctgaaagagcatcattctggcaatgtaatattgcccacagcagtggggcagcctcctaattgaattggttttctgtttatgatagcagtgttatggttctagaaaggcctgactcttggtggcctgattattgaagggatgactgctactgtggcatctcactgtaggtagaagttgcccataaaggctcaatctgtttttaaagtactatgatcaatctctagctggtctcagtaacgtgctaaaataaagtctgtcccctcttgtggattcctatcagacacagtctcaatatggtcagaccggctgcacttagctattgtcctcttctagcagtctttatgatccttcttctttcctaccttgaccattcctccagtatctaattccatccactaccagctcactcacgctattcaaatcccaattcacacccctagcagtctcactccttacaagccatctcctgacagcattaataattgagagtagaagcagtcatttatcaagctcttacatggttggcacttttcatatactcttttgtttcatccccaaatcagccttaggagataaacatcatcagacttatgcaaccagtaatgacacagagagtccaagccttgaggtagctgagccaacatcttacaggcagagtttaactaggaaactacatggctccctactttatgctggcccctccccctgctgcctttgttcaaatcacctttaattccttcccgttcctgcagccttccatatttccctgtcaccaggtgtgtgatttcttcattcccatggaaagctcactccacattttcctttccattgctctgctttccatttccatgtttctccctgatgggagtcttccagatcttctggtgtccccccatcctcagtgacacactctccactggagcctttggttctctcaatggacatctccactgacatccaaatcccagaaggcagcacttattcagcgcagctcctgagatatggctgactatttattgaatattttataatgaattttgaagaaagccatttagtgcccaagttcatcttatggaaagaacattgtctaggacgtcgggttaccacgtcaacagttaaaaataagcccaaaatattgaaatgtagcctgaatgtgatagttttcttacaaatgatttttagtactcaagaggatacctattattaggcattctattaggtatctattaaacaaagataacatgtgcagaagacaaaattcacccaggaatctgagaatttaaagggggaaaggccagtctcctttgcctttactggatgactcttataagcaaaccatactatgcattctactctgaggtatgcgtctgctccttctatcatattgattttagaaataattagtgagcatactaaccataagagttagattaacttttggtgtacttcagaatcacatgaaaggtggtggtggtggtggtaattgtgtggtggtggtggtggtggtggtggcgtcagtagcggtggcagttgttattattgttatagtatcattgtttgtattcctaaaatcccaggctacatacaatagcaattaaattataatctctgaggttagactgtaagcatcaggattatttttaagttctcaaactttaaactaaagtttaagagttaataatgggttttgaagggtagatgacagaagatttagggtgtggattaaccaagtctaagaattacaaaaaagttttatgaagacctgccccatatttgtaagtcaattacaaaatacgtttttaaaggctattaaacaaaggtggggaattctgctcctagaagacatgagttattaaataaaaatctcagggccagacataggatatctctctatgacctattggtcagggaggccccacagatctctaaaacaatgcaatctgttgtctaggcttccatcataactagatgataaggccctattaatgaagacaccacacactttgcagagaactcaatctcaaattaaccaggaacctccctttcatagtaccatacttgccactggaagagagaagacatcaatgatcttatctagaatgggttctgtaagctacaataccactcccagctaagatgtccacggatggaatgagttacagggataacaaactgttttctgatttagtttgggttttgctccacaggatggaagtcatatctgatgttgtaaacatagccagaagtgcatggccgggaagatcactgtccctagggaggatcagactattgttattttgctggagcaaactactttagccagcttctcaaactgccttttaaatatttatgttatgcccaaaggtcggtactacactcaacactggtcagagaaagtggtttttgcagtggccagcagtcattactggtctgaaaataagtgattatgaggacttaaccctaaatgagagcactataaactctcccccagtacttaacaaaaggggggggggcgggaaaaaaaagagctaaaggacagggagaatgctattttatagcgttctataaaatgttagcttctggatatggcatggctgttgtgcttatgacctcagtaactgtggttacctgcacaagatcaagccagtcaaaagtccaacatggatggaggaggggctcactaatccttccttctacctcaggacctattgtcacttgatagggaaagaagagtcatttttctttgagggcatagccactaataggttacccatacttcagtatatggtctcatgcccatatacacttgagtggcactaactggatgcaatgggatattgttatgccagggcctcttgggtgccacagaagaactctaagaattgccaacccactgtaatataacaaaagagcctttatttgaatcagacctagatagcaaaccttccccacaggttaagaatgcgatactggagtctagctaggggctggaagtttttatgcataagcagggatcctcagctttggggttacatgatggggaggtgacaagaaaaaccatccctcaaactcaatactgtttgttcagacagcaaggcagaattgtgcagctgggagaggactcctctgacctgagggctatcaggaactagtttttacaactggccacagctgtctgggaatacctaattgcccttctctcctggacaaaaagtggagtactgatctttgcaaggatgcttggttcatttttctcaaggacgggagccattaacactgggaagtgctagttatctaccagggaggatcccagcctcagagatacggaagttgggataagtattcccaaagctagtatctgccactcctctgaaagggaggggagtcattaaggagtgccaccatgaaaagggagattgcaatattctggtcccaggttggactcttcctgttgggagaggggagtggagctctgcttcagcagcaggaatgtacagagacaggcaggcttcctgcatctcttcatcacacccaaagagcttgggactctcctttctctctcttgtttggtgagatgatgattaaggcaatcactggactgagcacagggtcctcaatggaggagctagagaatggacccaaggagctgatggagtttgcaacctcacagaaggaacaacaatatgaaccaaccagtacccccagagctcccagggactaaaccaccaaccaaagagtacacacggagggactcaaggttccagccccatatgtagcagaggatagccttgtgggacatcattgagaagagatgtccttggtcctgtgaaggccccagtgtaggggaatcccagaacaggtaagtgagagtgggtgggttggtgagcagggggagagaggatgggatagggggtttttggaggggagatgaggaaaggggataacatttgaaatgttaatatagacagtatctaataataaaaaataaacttaaaaaataaaaacataaaataatccttggcatcatttaaagaatcagatggtatcttcctgggaatcaccctgatttatgaaatcactttgacttaaataaaaagtcaaaatgtgtgcttattcagtattgttaggggagggtttcatgaggctctgcccatagctgaggggctattggcaattgatagctgaggcgtgcctttttcttttgtgggtgcagctactggacccccacacatgcacagatttcccagtgcacctgcaggatacactaactgagctcagtgaacaggagatgaaggtgaatagagtatgatgcaagcaaggtacattgtatctgagtgtacaattggtaaggataaataaaagtatttttggataaaaaatttaaatgcatgctaaaataaatgagcaaagcttttaaagttaattgtttaaattttcaacattcaaattacgtcctgatgttggcatcacccagcaacttggagaaaaaggagcatctcttacagatatggaacaggacatggatttttgttaaggatcttgttaaagaaatatcccaaggtaccactctatctagagaacactggcttctctagtaaagatgatggcttagagtctactctatcccccattcctccagctctgtctacctttggaagtagcatatcctttcccttcctgcatctaggcaaatgtgacagcctacacattagagaacgcatcagtatataaacacaatgctttcattcattggaaattatcatccatttttaaactttgcccttttgctcactctctccgtgggactcttgggaaagagctgcgggctgggataagagtatgcccattgtggtgaaagctttggacaccatcaagatgctctggtgaggattgtcccttccctgtagtaaagaaaggagagaaaacatgtagagattaacaatgggaagagacagtcactacagcatcagcatgcttgagtgttaagtcctcgtaaaagaaattgctaaccttctgacctcagcaagtctcttggactctttgttcctctgctttaaaatgagaagaatcctttccaacgccaccaagtcaggatacgtactaagtttgaaaagtatgcagctgggggtattttattgtggacactttctctaaaagaccttggcttgtggagagcagagaaggagataacgaatcaatgcaggtttgaaagaaataaaggttcattatgcacaaaggtgtttccttctgcatcaggagaaaacagccattggctcactcagcaaagacctccatgaagcaaacactcaaagggtgagtatatctacaatccctacaaaatggagaactccttagggtcaggcttccacagaggcagaacaccaaggaccctctccttaagtctacgctgaggcagccccagacccgccgctgcagataagccccttgtccacatagaaatgaagcagaaattcatctctgaagcagcacgaaccaaggtgtctggcacaaacagaacttggaaatagaattgcaccatcagtagaatgagggaatgaccagcttgagttattgacgaatgtatctcggggcacacgaagctgaaggtcagtcctcctccaagagaacccagcctaagtaattcactattccattctcatggcttagaccacagatgacataactgtggtgaccttctgactctgcccttttctgactctctggtttccttttactagctgtccacatagagtcagcagaagctctggagtaaacaggaaaaaaaaatgcccatcccatcccaggatagacagttgcagctaagaaaccaacagccaaatgctgaaggaaactctgttcctgctgctgatgcatgttcacaaagacacagagctcaactgtgatctttccaggttcctctgatgtcattcatgatgtattgacttaatccattctatagcacgtaagcacgattgctgacgcttattgaatccaggcagtacgctaaaccttccagacactgtaggccatttcatgctcccaataatcacatgagattattggagaaacagaggttcaaagaaatgcaaaagcttgtccaagagtaagcagcttcttagctgaagaaccagttgtaaacattcaccatctggctcccgagtctcatctatcgtcagagagtggtgagcagccaggaggccacttgcctttgtgcaagcgtcatccataaggattttgccccacctctaccctttcagcttagttaacttgacctttttcacaaaattccatatcagatcttatttctcaggagccactatcaggctaagttagaccatgagacttaatggtctcaccaccagagtcattcactctctgcaccctatgtgtctgaccttgttctctgagaacaatatccaaatgcagaatgcattccctcccgtgtgtacaaagtaaaaccatccctccttctagttattctggcctgatcctcctcccattcacactctattgtgggctacagaaaaggacttgctcatttaagcctctgcagaaccttgagtcttgattctggtttctccacaaatggggtacctgttctctttgccactgacacttgggagtggaaaagtatgaattcaataataccattcaccctaagtcaaacccagtatggccaggaaatagctcacacccccatacagaatcatacagctctttctgtaattcggagtcttggcacaacttttctgggttccagacaggggaagaagtttggccacccccatcccaacgtgtgtactcatttcctgcccaggacaaaccacttcccttcatgagcgcctgtatcttgggtaaaaccccacccccacctccaggctgtcatcttgtgctgtgagcccaacctcacaatcatccagcactccggtattagtactttttccaaattgtatgtgattcatctgcatctaccatcattgtgatccca

SEQ ID NO: 1409 - DNA, 1768 bp, Mus musculus
caagtcacatgatccaggatgcaggggaaaatccttcttggaacagagctgggtacagaaccgaatcagatgaggagagataaggtgtgatgtgggacagactatataaagcatggagccagggctgcaacaagcaggcagctgtggggctccttcccctgacccagccatgcaggtgcagcccggctcggtagccagcccctggagaagcacgaggccctggagaagcacaagtcgcagctacttctacctcagcaccaccgcactggtgtgccttgttgtggcagtggcgatcattctggtactggtagtccagaaaaaggactccactccaaatacaactgagaaggccccccttaaaggaggaaattgctcagaggatctcttctgtaccctgaaaagtactccatccaagaagtcatgggcctacctccaagtgtcaaagcatctcaacaataccaaactgtcatggaacgaagatggcaccatccacggactcatataccaggacgggaacctgatagtccaattccctggcttgtacttcatcgtttgccaactgcagttcctcgtgcagtgctcaaatcattctgtggacctgacattgcagctcctcatcaattccaagatcaaaaagcagacgttggtaacagtgtgtgagtctggagttcagagtaagaacatctaccagaatctctctcagtttttgctgcattacttacaggtcaactctaccatatcagtcagggtggataatttccagtatgtggatacaaacactttccctcttgataatgtgctatccgtcttcttatatagtagctcagactgaatagttgttcttaacctttatgaaaatgctgtctaccatacagtacttcatctgtccaaacatgggccaaagaaaatattaggacaactcaaactaagcatgtgagttagtgcacttctctttctgtcctttggaaaaatacaaacccaggatttagaaagtggagtctccttcagatgcacaaacaggaaagaatgtgatatgtgcacagagacctacttgggcactagaaggggttgagttgtcccagtataaccactaattcactgaccttgagccatttttccttcccctggaacttggggtctgaatctggaaaagtaggagatgagatttacatttccccaatattttcttcaactcagaagacgagactgtggagctgagctccctacacagatgaaggcctcccatggcatgaggaaaatgatggtaccagtaatgtctgtctgactgtcatctcagcaagtcctaaggacttccatgctgccttgttgaaagatactctaacctcttgtaatgggcaaagtgatcctgtctctcactgaggggagtagctgctgccatctcctgagacatacatggagacattttctgcccaaattccattctgtgtgcagtttttaagtattcccccaaaagttcttgacaatgagaactttgaatgtgggaagagcttctggacagcaaacattaacagcttctcctgaccagagagaccatgcaagcttggtcttagacccatcaagcttgaggtttctacattgtgggagacagacttttgacaaaccatttgagttgatgtctgggcccctgggagttctccttcagtaaggagagcaagccgttctagtgctgtgtcagaggatggagtaaaatagacacttttctgaaggaaaggagaacaaagttccagaaaaaggctagaaaatgttt

SEQ ID NO: 1410 - protein, 231 aa, Mus musculus
MEPGLQQAGSCGAPSPDPAMQVQPGSVDWRSWWRSTSRSYFYLSTTALVCLVVAVAIILVLVVQKKDSTPNTTEKAPLKGGNCSEDLFCTLKSTPSKKSWAYLQVSKHLNNTKLSWNEDGTIHGLIYQDGNLIVQFPGFIVCQLQFLVQCSNHSVDLTLQLLINSKIKKQTLVTVCESGVQSKNIYQNLSQFLLHYLQVNSTISVRVDNFQYVDTNTFPLDNVLSVFKSSD

SEQ ID NO: 1411 - DNA, 57036 bp, Homo sapiens
gctcacccctggccaggtgtggtggcttacatttgtaatactagcactttgggaggccaaggcaggaggattgctttagcctaggtgttcaagaccagactgggcaatatagcgagacttccactctacaaaaatttatttttaattagccaggcatagtggcacatgcctgcaatcctagctacttagggcactgagctggtatatgtaaagtttttgttttgttttgttactattattatattttattttcttgctataaagacataggtatacgtcaagttttaataaaatgcctttgctttctctttaggaaaatgactatggagtaaccttatagcactattccctggaagctattccccgataaaggtggaatggcattgttaatgaggaaaatgacatctgattgataaactgaggtgggaggatggcttgagccccggaggtcaaggctgcagtgagcagcatgcagtgatcatgccactgtactccagtctgggcaacagagcaagaccctacctcagaaaaaaaaaaaagaaaagaaaaatgaaagcaaaggctcagatcctttcaacaaatgtaaattaagtgcccgctatgtattatacaaggagattcaggtgttttaaacacacaatatccatcctttaaccactctaaaagtgaaaatgattattatcacgctaccagtggaaacaactgagacttggggtgactgagtggcccccctaaaggctgcaagcacctaccttattgcagggcttcatagatgtttgttttggagtagaagaaagtggaaggggagttgaagccagatctgcatttcctagacacctctttgaactattcttcaaatattcagtcttctatagcttcactgaggacaaatttcccagagaaatttgctccactcagtctttccattttcaacaccttttgcatcccccacattgactatcccctctctggcccctctgcccataggcatcaagcaaacacccacacttgggcaattactgtcttccaatcctccctttctttgcacagctgaaagttcaatgttaagaaggcgaagtaattaaaagtataaaaagaaaaaaatcactgtaaaatgaattggtgctctatgctgtggttcacctgtttctcttttgcttgtcttttcacagctgaatatatgcaccactgtacagctaatgtacctgtccaatctgatatagcttactcaattgccctatccatgcagagatacattgatttttacttcaaaaccaacaccaccaagcttcctatttcatagaaattgaaaaaaaaaagaaaaagcccactttaaagagaaaaggtcacttcctgattttgctaacatcaggaaacaaagctttagatctttcagtacctgcctccgtccccaacaaagcctataaatctagcataaccagaggacagatgccttgactgatggtacatgtgaaaagtttgagtaactcagaaattagccattcttcttttcaaaaaatttcagatcttgaacttctaaaatgtactcagattcagatctctctctttctctctctttctttctttcttgaaatagcgtttgttcatccaaactttttgcacaccaattatgttccaggaaccattccaagaaggcaccagtcccctgagacatctatgtgcaacattttctatctacttctgtttcgaaaacatgtgtgagtacatgcacttagaggcaaaaggcagagtggggagagacagatatttggaggatggaagtcagcaagagggaaccagagaaaaagccaggcctgagctgagatctcttttctgggatggtcctgtgtttttggatctctgtaaaatgaaaaaaaaaaaaaaaaaaaaaaaaagccttaaaacaaatcgtgtttttcctgatattttgtatttaaaattactaggtaaatgtacagtttaaacatttattaggagcctgctaggcatgaacatgtacaaaccacatgctgtattctcaaggtgcttacactgcatttggggagaggcctacatagctacctagaatacaggtaatataattacatactggttacagcaactttctctggaatcaggcagacctgtgcaacaatgctttgagaagaaagaagggagagttgttcttgtctggagatgtagcccagtgatttatttggctagcttggagtctcacacttcaagtcaacataagaaaggctcacccctggccaggtgtggtggcttacatttgaaatactagcactttgggaggccaaggcaggaggattgctttagcctaggtgttcaagaccagactgggcaatatagcgagacttccactctacaaaaatttatttttaattagccaggcatagtggcacatgcctgcaatcctagctacttaggggactgagttggtatatgtaaagtttttgttttgttttgttactttctccgtcaattagtagcagtaaaaacttggaaaagccattttgccactccaagtctcagtttctttatctgccaaatgtgaataatagcattagtgggattattgtcaaactaagtgaaattatgagcatcatgtgcttagcacataaaatcgtaatatgagctcactaaaggtaggccgttgttgtgacggtaaaatagtaattagtactctcatcattattgattgcaggtagaagcataatatgaaaccctacagaggaaagaaggatttctttcttactggaagttgagggaggaagcacagaaatgaggcaatatatgagcagtaacttttttttttttaatgaaagatgtatgaaagggttttcgatgtcacaatgaggatgccgcctgcacaaaaatggagtcaggcactggggttggaataaagaagtgtgcctggagtcaagggagtggaatcagaggctgaaaacaaagctaaggggaaggccagggaggccttccaaggaaacatgaccaggattttgcaggcacggggagatgttgaaagattttaaactggaagaggaagggagtgaaatgaactagaaagagtttgggttggagccttactcatcaagctagtgtagaggtagaagagttaacctcaatgaagtcccctagagaatgacagatcagcttaagatttccctactgtgtacacataacaccatgaattgtctgttattaatataaattaggttatataataattacttatttaacttcttgtcttacccaccttactgtaagtttcatgaaagcagagataatgtttgacttgctcattgttacatgggcagcacctagcacatattaagctctcaaatacccaatggatgtctcttcctttatccattattaatcgatatagaaggactttccccagctttgcaaagaatgcagactcatctctcttctttgaatgacaatggagttattaaggaccatgtaactaatagagttttctagccattcagctatactggaagcccccagaagccagaaaagtgatgttcttttttattttttatttccttgaatctcctacttccctagtattagtttatcattagtcctgcatcactaaaaatcataaaactacattaaaaaaaagtttcagtatttccacttggtaaaatctgccattatcctaattcattgcaatggcatgctttaaattcatagattacattcatctggtattttggaatatgttgcatatctcaaagcgctaatataaccagcaatatatccatttctccttttaagctcatctgctttttatgaccaaagagagttatgcaatccaatgtatctgcttcttttccctggttaccaggaagctcataaatatacatgttatgcttaactattaaaactgttatcagacaggatttcttaatacattcactttactctctacttttatatcttgactcctaccttttactttgtgttaatggcttcagtatatacctgtgcatttattttacattgtctcaaaacctttttaaggttgacaggaagatgatagatagggagatagatagatagatagatagatagatagatagatagatagatagatgatagatcaatagataaatatatgatttaaatacacacatatatatatcaccaatactggaagtatatctatctaactcccagatggcttctgtcccacctttctatcagctctgtcttcttcagtaatctatttttgtcatccaccaaccagaacacatagcttctctacaattagtgaattccaaaaagaatcttctcacatgaagcatgagttaacaatttagacattagggaagattttatagagttgcctttttttttgtaccaatttatgggccacatgtgaaattttgttacatgtgtataatgcacagtgatcaaatcatggtatttagggtgtccagctcctgagtaaagtatatttttgtttaaatatagtcatactactctactatcaatcagtgaatttattttttctatcctctgtatattcatacgctttaacccacttctctttgtcttcccactccccctgcactcacccttcccagtttatattcttcatctttctactctctacctccacgtgacccaattttttagctgccacttgtaaatgagaacatgtgatatttgtctttttgtgcctgcttatttcacttaagataatgatctctagtttaatccatgttgttgcaaatgacatgattttagtctttgttatggccaaatagtatttcattgtgcatatataccatattttctgtatccattcatctgtttatgaacacttaagttgattccacatctttgctattgtgaatagtgctgcagtaaacatatgagtgcaggtatctctttgatatactgattgttttcctctgggtagagacccagtagtgggattgctggatcaaatggtagttctattttcagctttatgaggactcttcgtatgatttttcatggtggctgtactggtttacattcctaccaatagggaattgagttcctttttctctgcatggaagtgtattaggaaatgcatttctgttctttttcccagatctctttcggttaccctgccttgagtctattttaatactctaaaccaagggtcagcaagctttctctgtaaaggtctaaatagcaaatattttagacttcggcagctgtgaggtctctgttgaaaccactcagatttgctgttgtagtggaattgaagccatagatgtatacacaaagggatataattacatttcaatacaacttcaattacaaaaataggtgcctgccagatttggcctatggttcagtttgctagccctgttccaaatcttcctcccactgcccctgtcctcactgggccctctcaatgaagtgtcactgtggctcgactccaacatccaatctcttcaagttagccccagcaagacaaagagctctaaagttaaagggacaggaccctccctcctcaaaaggccatttagttacatgtgttattgcttgaatataccctgggtgagtctgtccttgtctcacatatacccatagtttaaaaatatatattcctaccatgtacagtgatcatcaaaagataatcttaaatggataaaattattaagttacttttaatggcaaaaaccgcaatcacttttgcaccaatctaatgatttttaaatggagtaaaatgtctccattctattccaaatatatctgcattccagaaaggttctgaaggtatttctagagcctgcagccgtagtcaaggttagaaagagggctcaataaagggagcagaaaaactagtctgtaaaccaacatgacccagctacatggccccagacaataacttttattatgcctcagtttccctacctacacaatggaggtgttagtttacctgtccaaaggctaaattttggaccagatgatctcttggagattgtttccctaaatcagtgtttttcaaatggtctcaggcatctgcattccctggggtgctttgttaaaacagactaccagaccccagcctgagtttctgaattagagtaggtctagagggtcttaaagtggcaccaagttcccaggtgctactgctgccactgctggtgtgggcttacacctgaaggcctctagtctctacaacagagatctcccagtcccttatacaggaaagcaatgttggaggaatggctactgctggcttccctttacttttcaaaatggctttccttcttgaagggatgagacgttagttctatttgcccactgagtctcaggcactgcagccacatctcagcagccaattccaggctgaaaggaggctgggtggtcactctcatgaggccattctctggagaaagatagagacacggagtacagttgagaagagagaggcaagaatgccaccacacaattcctttacataagccactcttctagaactttctctttccataaacatgaagcatagattgaaggtcaaccctgcatatatgaccagcagcaagaaacgcaaggtgggatgcaaggacttagaagactaggaaagtgcagaccgccctcagggactctcatcttatgagcaaggcaacatttacatgtgtttacacacttgggttccacatcaagagaagtagataattagacaattaggttatgtggcatgaaaatagaggcattccagagagggtgttggtggacttgagagatctgggcaagcattcctggagatggtgaggcgggttggcaaaggctggaagggagaggaagaacaggagcagtggaaagccaagtaaaacacgagaggaagcctggatgcacctggaatattagcagagccgacatgagaatgagcagagagggccgggcaagcagagggggttgggtgcggtagctcatgcctgtaatcccagcactttgggaggccgagacaggcagattacgaggtcaggagttcaagaccagcctggccaacatggtgaaaccctatctctacaaaagattaaaaaaaaaaaaaaatagccaggcctaggggtgtgtgcctgtaatcccagcaactcaggaggctgaggcaggagaatcacttgaacctaggaggcagaggttgcagtgagccgagattgcgccattacactccaacctgggtgacagggcgagactcagtcaaaaaaaaaaaaaaaaaaaaaaaaggagagagaatgagcagaagggactcttacacctgtctctctccctgatggtatgtacttcctttagttgttcccatttctgtgtcccagtttcctccttttgtggaatgaaggattcaagccaaattttctgaagtttctaaattttattcaccttggagagaccccatgccagaaaagggcaaatgagcaggtgaagcttagcccttctctttgtcccacctgtgcttcagccaaagcagccctgttttcttatgtttttatattccttatacagctttgcttccagaaaggatttaaaacttactcaacaagaaattctataaaggctccttccatctgcacatcgtacagcttgagtagaagacagaaagaagccagttagcacaggtcatggatttctatgttggccaggctagattctagaacagctggaaagcagagaggggcttagagcaatgggggtgggaaatagggagccactgaaggtttgtgagtagaggagtgtcacagcaaaagaatgaattgagcccacaaactactgtactaggaactgatccgaaaatctcaactgctcagaaagttgagtaaaaacaaagggtgatttttcccccttgtcagccttccctcccaggacattgtattgtatgcaaaacgggtaactgtaagacaaacatttttttccactgcccttctcagccccacaggccttcaggaagacccgaacttcaagcaaagcctttttatttttcaacacccacagcttccattcaacaatcagaagttttccactttgatcaaagaggctgaacaagagggccaagggagcagctggttctcagcaactctgggcagaccacagagcccttgctacccactcactgtccgtgcccaccagaggacacagccttctccccaaatcagccaggtacatgccccagaaaacactggcttgcctcgttcccaccttaattaccggaccaaacgaacgtgaacacactgttttcaaaaccaaactcaattgggatcacgggggcctcggtttccttgattgtaaaatgggtatatcgccccccactctatttagcccaagaaaacaatttatctcttgatgtctctttcgtctccaggatctatgcttttacagactcactgggaggaaatatccagaccaaatcctaaagcctgatctaatttgggagatgctcagaagttttggttctatgcaagaacagcagtggtaataatccaagcttggctttagacacaggacgtttccttaggggcatctgggatctctgctggctcaaagtgatgcgctgcagacaaaaagtgagcagaaaggaaaggaggtgctatgcagaatgagcttcttccacggtgataccaaatggagctttcaaaggcccacatctggaggcagcagctatgcagtgattaacattttaaacggtattttgaaatggagatcattagtaaccacagatgtgatctgactctgtcccccaggtaatctgtctattgtatctaaattccagacttagcccagtagacagcttgggatgtttaacaggaattgtccaacaccatccccaaatctatttttattcatggagtactctgacatcatctcgcttggtcttcctgatgactgtaatgcagattgggaacagagaaagccataaagacttgtatgatggcccaaggctaagaagggaaagggctgagaccacacttcaggttttagctttcaggtgcagtgaagattgaatgacttagcacgagctttcagccaggcaggctgcaaagtgcacccaagttctttcagtgatcgacacttgcgacttaggttgagatagttttcatcctccctgagcctcagttttcccatctgtaaaaaataaacattgcctgcctcggagggtggaggtggaagtggaatgaagccacatgtaactcctagcgctgtgcctgagacagtagaggttcaattatagtagtcacatacacacacaacacatacatacacaagacacaacacaccacacacaacacatacatacacaccacacacaacacttacatacgcaccacactcggcatgcattgcagatcacaaatgcacaccacacacacactgcatacatataccatagagaacacacaacacctacacatacccccataccacaaatacacacacactacatagtacaccacgcagaacacacacagcccccatattccacaccacaccatctcactgccaattccttcccctcttcatgagttttacggcaggtccaggttcatctgccagtttaacagatcccaaaacttctgcaggagtgtttgttcaaaagattgatatttccagattcctgctttctgacagtatctttgaaccccaaatttcatactgccatgagccagtccccctttggagaaatatctccatttgtgtgccctttttcccccagggaacctgcagcatgtccctttttcagcagtagcctatcaaaccgaaccctttggagttattacactgcagtccgagggatccggcctccctgagacccagcaaggactcattatctggggaggtcttctgagccacaggcctcgctgaaagaaggtgcagcttcttgaacaggaaggcgttttgtggcagagtctaaacgaaacagaagttgctttgtgtgtgcgcacgcatgcacacacacacacacacacacacacatacacacacacagtcggggaaccgtcattttcctacgcgccctctgacatcagccaccttctctgtagctagtttctctgcacacaacttaatccctggcaatgaaaaatgaacctctcccccacccttgctgccgcctctcgcctcacgcccccagagaagagtttctccaccaggcagcaggtgaaggtttttttccaagtcacatgattcaggattcagggggagaatccttcttggaacagagatgggcccagaactgaatcagatgaagagagataaggtgtgatgtggggaagactatataaagaatggacccagggctgcagcaagcactcaacggaatggcccctcctggagacacagccatgcatgtgccggcgggctccgtggccagccacctggggaccacgagccgcagctatttctatttgaccacagccactctggctctgtgccttgtcttcacggtggccactattatggtgttggtcgttcagaggacggtaagtggactcctcttcctccctttccttttcttgttgttttcccgagagaaagagccctgggaacaaatgatattcgtttgttggttaagagcacaaaataaaattaaataaataaactctctctctcatatatatatatatatactatagtatatactgtataacgtaatacacttatgttacataatatatattatattatacagtatatattatatatatatatatatatgagaaagggagaaaagaaagaggaacttaactctctaaaataatttggcttgttgagaaaaatattgttagaccatcatcttaaaactttgcagatctgtctgagcaaaacagtggaggggagctattggccttttaaagttaagatttaaatcttaatgagccagagacccatatcaaggaaggaagcaatagagaaacctgataacacatttgcacaagttgttatcatgtcttcaaggacttcagactggattctgaggttctatatcctaagtctgagtgtcctggaggtttctgaggcctcacccattgccaagagttttgtttttgcttttgttttatacaaggagctaagtttcagaggccaaggtctagaaggaaaggaggcgaaagagaagaccatggcttcttagagctttggacattttggtgttaaagccagcaagacaaatcgaaagcttcctcttaagccacaactttgaagaagttagggcgtcacaaaaaaaaaaaaaaaagaaacagcacatagaagcagaaagttgaaaggtttttagcacctgttctctctgatgttcctcacaatactaagcaatcgttgggtacacactgtacagggtcagactgtcttcggagatttactttgaagtaaatggtaagatttgtttctgaaaacagaagaggaggagaaagaggaagcttcttcatattttagaaaattggtgtttacagagaatctaccagtatatattatatagaaaatgctgtagtaatagcatatattgctcatgaattttttgatgaagttgttaatgggtaatttaagagctgcacccacccacatgacctgccaaagtgagaatatttctgtttcttacttcatagtgcctacttttcgtggtattataatcctgctgaatttattctggtttttcttcagttttcttaggccaagtactctatagcttatcaattgctggaaagaactaggctttaaaaggctttgatatctatttctcaagtgtcatcaagctttgaaattaaatggaagctttgaagctcatatctctacaaaagtgaaaagaaggagttgcaaatatttgatttagatagtggaattcttaaaactcataatttaatggcttatctacatctattaagtataataatcttgaaaacactttaggacatcttttcttctgcaggggctctgcaatttctgtaattctaatttggagtgaaccaagggtatgtcattttatagcaatggccaaagaaaagaaattgaagtgtcctttaagaagttctttagttaaaggatccaactagaactgctgagagagagagagagatggtggaaaaatgggtggcgatggtgatatataaagctagagagaacttcagagctcattcatatccaacttttagttgaattgatttcttctataaaagaaccagagcagatctttctgcctcatttttgtaaatgtggaaaatgaggagcagagagggaacagggcttgaactacgtcaccctgagaaagtggtagagccaatactgcttgattgcttgatgcaagcagcatcccctttgccaatacagacagccacagaagcactaagaaacattgcacccactcttctcttgggagctttatcttcttgtgcatccacttccttgacttacccctcatgtttggatatgaaaagattcactgtgcaatctgattgtacagtgcggtgtgctgtgatttcttagaccaggaaatatcagttgcttccttaaaattaaggcttgccatgttaatagtagccgtggtatataaagtgtcaaatgcattgcacatatcattttcaataaattcctcagaccttaactgttgtaagacctaacaagaaaaaaaaaagcatcattttcccattaacttgagttatcaggaagggtttcctataggaagatggaatgtagactgacttgaaaacaggaagaactcagacaagtgaagagactctaaaagaaactctaggaaagaaatcaatgggagaaagccaaggagcttagactcacatcaccattattaaaaatggaatgagttaatggtcaattagcactctgtatgtgatgggaacaggggtggagaaccataagaatggttttactggcacaagaagtcacacaattcttatcccaaggcacgtgtatagacaaaatttaaaacagctaagtcataacatataatgagtgattaaagggataccatgacaccacaagttaaggagagaatatatttttccagacaggtttaagaaaaactcctggggattagtttcaggttggcttgagaaatgtgaacaatttcaaacaggcagggaagggaaagcagaggagaggcactcctagccaatggaacagcatgagcaaagagacagaggagagaagacagagaaagtgtagggaaatcaacaaagcttgccttgaggtttgacttgaagatcagataactccaagcttaaactccttgggagagacaaaggaggaacttaggtttctatctcaaatatttattaaatatctactgtgtgcaggacattgttctaaagccttgaaaaaaaacaacaaaatccctgtctttgagttactatggaacttacttctttcctgtgatatttttgaagcctcagtggtggttgtattttgttttatttacatttaagccagcatatttataaaataaatactattttatataataatattactttatattataaaataaacattttatattataaatatattataaaataaacattttatattataaatatattataaaataaacattttatgttataaatatattataaaataaacattttatattataaatattatattataaaataatattttatgttatttaatattttataatatattgatatattttataatatttatattaggaaatactatacttacatggtttaagaaaagtaactagcaaataagagaaaagaaagtaaaaatcttcacaccttccccacccaaccactaatccctcttcacggagataaccaccattgacagattcttgtgtgtccttccaaaaatctgtgcatctacaaatacacagtacacattataatatataataaacccatgggtcattataataaacccataattttgcatcttgctttattcacttgacaacacactgtatatcttagagatccttccatgtcagtacatagaagttcatttcattcttttgaagagtcgcatagtacgaagtgtaaatgcttcataatttatctgtgcctggtgagagacatcaatgttttctctagaatttgtgccctctgtgcgtgtctgcaagtatatctggggaataaatttttagtgataggaatggaatgtgcattttctttttttctttttttggagacagtctcgctctgtcgcccaggctggagtgcagtggcgcgatctctgctcactgcaagctccgcctcccggattccccccattctcctgcctcagtctcccgagtagctggaactacaggtgcccgccaccacgcctggctaatttttttgtatttttagtagagacggggtttcaccgtgttagccaggaggaatgtgcattttcgcttcaataaatgtcagtctgtctccaaagagattgtactagtgtacccctgaggaattaaaagtcctaccaacagacacttctttacatcaatatggaaagaaaaaaatgatttactgttgagcaagcacaattgtacatgcaaataggcagcctgcaacagactacaaagtcaggatgaaatttcacacaattaatctagcaaagcaaaagaagaaaaaataaaacttctcttatctcctcaagagacaggggaatacataatgagatagacaatgagatagactcctaggttaacaccacaggtaggtgtttacatttcaaaaagcctctgaagccctcaaccttagagacgtctttgttttgtaaaccaggagactgggcttctctagccccaggggagaatgtaaagggttacattccaaaaggttggagtatagggttcacaatcggtaggctttcaagaaagaagctgcctcttttccctttataagcaaaaaaaattctttttttaaaaataataataataatactctttttaaattatctccacaccaacagtggagctgagcacctgtttaaggggagtaattattggtggtggtgatggtggtgtggtattttgggtttatttttaagctcagatacaaaatagaagtgtagggtaaacacacctgatatagcaataactgaagcatacccttagaataaccacatatggcagacacgtctgaatgggtgttccaagctagagagtccaggagtggtcaacctggagactcattccttgtctgtgaggaacatctgagcccccagcccatcccgtggaacatgggccatacaggagattgaggcctgagtttttggttacatgaaggctgccaggtggaggccattaaggggaggctgttaagtgagcatgctatagaaactgcatgctatttgcaagtggttgtggttttcctgcccaacccaccaccactggacggtatataaggtgaatatgttgtccagcctgctgccatgagatcatttctgtccgtaaagcagttttcctgttcagctcactgccactggactctctcccctgtatgtaagcccccaataaaaccccacatcttgtttgctgactctacacctcttctttagcctcttgaacatggtgccttccctgttgagctaataggagttcggcacaagaagaagttatttggaatgccccatgacacttcccactacccaaggtactccctccacctgacattcattccatttagcaatccagaaaaatccactgtaaatcttcccaggagcgagccctgtgtgaggttatgtggggaggtccccagtggaaggggcaagaccctgtcttctgggaactctgttaaattgagcagatgaagcccaaacaccaagttcttgggttccgggcagaatggcacagaatgccacagagcaaaggagaagtcatttctgcttgggatgaaggaggagtttgtagaagagctagaacaaaagccaggcttccaagaattacaacagtcatggcttattcccaaagtcttattttgaaaatgttcaaacctacagaaaagtggaatggcaaatgctaatataaccttggcacctagattgctgtgtcaatatcttgctgtatttttgctctctctatataaggatatgaaagtaagctggaggcagcatgacctttcactcacatgtacttcagtacccatctcttaactaactgcaatgccattatcattgccaagagagttaatattaattcaataatatcatctaataataatatatggtccatattttaatttctttacttgttcaaaaatgtcttataggtatggctgttgtgtttttgtttgtttgaaccaatctagggtcacatactgtgttatgataatatctgttttaatctagaactttgctttttaaagtgtggtcctgggccttgttagaaattcaaaatctcagggctcaccccagatctcctgaatccgaatctgcattttaacaagctcctcaggtgatctgtatgcacattaaagtttgagaagcaccgagctaaaatctcctttgccctttggtgtttgttttaaataacattgacctttttttaaagggtccaggccaattctgttgtagaaatccattcatagcctggatttgtcttagtattaactcatggttatactcagatgaaacatttttagtaagaatagtatataggtaattctatatacgtcttattgtagcacagctagagacatatgtcaggttgtcccattttttttgactataggtttagtcacttgattaaagcggtgaccaccaactatcgcctttgtaaaacattttttctttctcattaacaagtaatctggccaggagcagtggctcatgcctgtaatcccaacactttgggaggcaaaggtgtgtggatcacttgaggccaggatttcaagaccaggctggccaacatggcgaaatcctgtctctacaaaaaatactaaaattagccggatgtggtggcacacacctgtagtcccagctactagggaggctgaggcaggagaatctcttgaacccaggaggccaaggttgcagtgaacagagatggcaccactgcactccagcctgagtgacagagtgagatttcatctcaaaaaaaaaaaaagaaagaaagaaagaaagaaagaaagaaagaaagaaagaaagaaagaaaaagaaagaaaagtaatctatgtatgggataatactctgaagacataaatactcttcacttggtggttttgccatttcttaatgatccttgtctgaatcagctaatgcactgagggttgaaaaagagggaatgcctaagtctgtcactccttccaaatttattagctgtcattcttctgtagagaagagctccccattggaaagatggtggcaggaggaggaggagcaggatattccaggtgaggcaaaagagaaagcagtggcacagcccataagaaggcaagcccaggtgtgaggagaggaatggtagggccagaagtcagtccagattgtacagaggagaagaaacggaactagatgataaaaagatttgatagaagagacggagaggacaggatatcactgccatcttcaaactagaaagatttcctaagcccatatctgagcccaaatctatactcagcctcctacagccatctctcaagacctcaggtgttctgattgcctactgagtagtgtatttaagactttgctactcaaggtgtggtccatggcctggcaacattggcatcacctggatgctcatcaaaaatgcaaaacctaagggcccctccctactgagtcagaatctgcttttaccaaaatcccccgatgctggtcagtcttttaaagtgggagaagcactgctttaagccactgtggtccacttctcactttggcagaccatgtgctcccagtaaaaatagtcttcccctgaggattttctatgacttctattcacttttccatgaaatttcaggagatttttctgctcagctttatcctgccctcatctagagaggcaatgtagcaggacattgaagagcagtgccttcaaagtcaaacacctaagtttgaatcccttctgtgctattcgccacctgtgggaccttctataaacattatcacattatgaaatcacttctctaagtcttgatgaatccgtaactcttggggtcaagttaaaggccaaatgaaatagtgcatgtagagtaaccctcattaagtgcccaatgaattagcttgaaaataagaggtatccttggcaaaagtccctttgggccatgagccagagcccaccttacaagactatgtgagggcaacaaggaaaggaatgtggacttcccctggcatattccaaacagagctgcctttgatcatttttggtccacgggggcattttgtgtccaaagcaaattcaggagctcattgcatctgctgatcattcctctgtgaaaagaaacaagcctttcaaggtattgaggcaaattaagcacatcattaacaccaaggcagtgctcaaaatagctatgcttttcaaatacttgctaacactttataatatcttatgatgtccacaataacccagtggaaagatggatgattagccatctaaccactgattaaaggagaagaaaacactccaaggcaaggaagatggttgggatgggggtcattttacctggagacaaacaggttaaacatgaccattcctccctccatacatgaaaataactttattactgttgggaatactcatcagacatctacagaggccaaaaacagaggaagtacacttaaggaagtatacctcgttgataaccacggagacaaagtttcctgagctactcagtggagctgagaatgaaaacctgggagagtccatttgtttgtgcctgcattcagcctaggcactaccttacacaaagccaagtcattgagcaagatagttcacatttcctgagctaggacccagatccccagacaagattagggagagaattctaggactgggggacatcttgccaaagaggagttggtgaacaacacttagtgtaatacctgtttatgaacagtcttcactgaatttcaacagccatcatctccttagacattgcttctccacctccaaatgcagggactgcttatgggagaggggaggagggaggaatgagctcttctatcctttgtttctggaaacagcatctctcctagggcagtggaaagtacaccagagaatttcagtccaagatctgcctctgactcatgagtgccttggtttcctcctccataaaattagcttgatggactgaaagatgtctcaatctccctctggctttgattgtctaatcttgactaccatgggtagctaggagaagctgtaaagacctcatcccaagagctcttcaaaataggaatagtcacgcttctgtcatggacttcctgggccctgggtgaaggtttaaatgacaggtttctttcctgtttgagatgctctgcttttgacatcccatgtctgaaattaggaaaccagaatgcattcaagtgacagagagaaaagaggctttccttgacccccatataaattaggtcctcctctctgatattacttctcacagctgtgctattcaaagtgttctgtgggccaggagtgtcagtattactcgaaagctgccagaaatacagaatgttggccaggtgcggtggctcacgcttgtaatcccagcactttgggaggcccaggcgggcagatcacaagaggtcaggagttcaagaccagcctggtcaacatggcgaaatcccgtctctactaaaaatacaaaaattagccgggggtggtggtgggcccctgtagtcccagctactggggaggctgaggtagaggaattgctcgaatccaggagatggaggctacagtgagccgagattgcgccactgcactccagcctgggtgacagagtgaggctccatctcaaaaagaaaaaaatgcagaatgttaaactccccccaaatctgcagaatcagaatttgcattttaacgagactcccaggtgattcatatgcacattgaagttctaacagcactaccttaaagcactatgattcttttcctccatagctcttgccacaacctgcaattctaattacacatttatttatattttttaaatggctgccttaatgactaaagcataaaatccataggatgtcttttagtgactaacgtagttcctaccacagaccaggtgctcattcaaggtgtgctgcatgaatgattctctaggacttcccgaactgctagcagcctctgcaatgatggctgtaccaggtttgctattctagcctctctcactgtccctgtatatgtccctgggcagcttgatgaatttgatgattgtggtaagacatttcaatgcagatatttttcttagtgcatttgcacatcatgctaatcaatggtcacgcttggcagtaagttgtaagttgtttattaaattttaaaatgttgtgtgttgtctcacaagggcaacataaaggggaattttgtgatatcaagttttcctgcaaactgcatgcataactgaaagactacaaaaacttagctttgttaggttaaaagctttcaactaaggcaacaaagtcgtagactgttacagtaggaagggccttccaggacaagtttgcctcccttcccctgagaaggtagggcccaaatgtttaagctgacttcccccatctccagattggtgctgtgccagggctttgccttcaggagacctccttgactcactaccaacctcttgcactagagaagagatccattcataagaaaacaagctttcagcggaaggcaaatgacagacctcccagggaaatgttacaataataggggaactccagatggtcctagtgttcatacagaacactaagaaaataagctgtgggcggctgctaatttcttgctttggtagaggttaggaagttggttttttcgcatacacacgctcacacctctctaggtctttactaatattttaattcaatgcaatacaggagattccaacctgggcaggtcaaaagatgaataaaatacttcattccttattggcagaatattgtatgggtgtctccatggctggagagaaaggggagggacaatcagggtgtgaaacttagtgtctgaagaatttattaggggaaaagaactgtgcctctctgcttctgttaactccttgttgagagtccttgaactagaacctccctttagtcaccttcaatccccagcccaggattccctccttcaaaagacaatctgtttctatcaacctcttatttgtgtaaatatttatgtatatatttattacagaataaataatatactatgtaaatgtttaaatatataatatgcatttgtatgtatactacatgtgtatacatatttgtatatttaaatataaacttgtaataaatccataaggatggggacccaatttaattatgtatggtgtcctcacaatgcttggcatataaacacacaattaattcagaatttccaaccacaggagacatagagatgtaccttcccaggtatgtttacaacatacgttcacagatgaatcaaacatggaaaaaaaaaaaacacatctacttttatgatatacttgattattctcatgttgaccagaaggaaaaaaaaagaaaaaaacacccaaacatatggaggggggaaaagcaccagattgggagttgagtcctggctctagccgagtgtgatagctcacacctgtaatcccagcactttgggaggctgaggcgggtggaccacaaggtcaggagttcgagaccaacctggccaatatggtgaaaccctgtgtctactaaaaatacaaaacttagctgggtgtggtggtgggtgcctgtagtcccagctactctggagactgaggcaggagaatcacctgaactgggaggcggaggttgcagtgagccaagatagtgccactgcactccagcctggcaacagagcaagactcctttttttaattagctgagtgtagtggtgtgcacctgtactcccagctactcaggaagctgaggcaagaggatcgcttgaactcaggaggatgaagctgcagtgacccatgatcataccactgcactccagcatgggtgacagagtaaaactttgtctaaaaaaaaaaaaaaagtcccagctctggtccctgatcttctataaattaactatgtggccctaggcaagtcattttatctcactcaaccccgtgtctcttgcctgtggaacggggacagtaatcctcatcttgcatttctaatagattgtcaaacaaatggatagaaagcccattggaaactacatcagtgaattaatttttaaaattcaggtggaggatgaattgtaaattgcacagtactttaaggacaacaaaatgaaaaagaaaaaaaaaagttgtttcaactgaatgtcacacctcatgctgcttttttctttcttttcttccaggactccattcccaactcacctgacaacgtccccctcaaaggaggtaagatcttggaattaggtgtaaatgtgtagtaagtcatctagataaatgccataaagtgtgaaacctgattatcaaccagaaacaactctatgacatgacccaacagtaaagtgggtaggggtggaggcaagggctgttcaggactgagctgatgcacctgaattcatcttagcagctcctgaactcatccccacaagtctcccaccagctcttgacactcccactaatgaaaattctacctctggcataggcaggactgcaaggcagtgttgtgttaaatgcttgaaacctgaaatcagataaatgggggaatgaatcttggcttgacttcccactggggagcctcaactcctcatctgttaaatgggaataataataatactcacctcatcaaggtattggagaagccattcagatctcatctgtaaattgcttggcatggcaaccagcacatagtaatcattaaataactagtaatagctaaaatgcataatgaagtcaaggacttgtgaaaacagacttcctcctcactcctatatttccaatcattgaagtcactaattaacacgtcgtctctactagcctcagagagatgatatgccgagttcagttaacatcgatgatgagaaattttcagatgacctgattaatgtttttattgctcagagaaggaaaaggaagacccagagagggaaagtgaagtatctcgtccaaggtcatacaaagccaagcctagaacccagaaagatgtcctcatctctgatacagtgtcttttctgcccaagaacaccaactcccatctcagtcctgtaacctttagaacctagatggcaaacacagctggatagccagaaagctcagagcaaaaagtaaggaagtgagttaatgtaggcaccagggtagtggcacaagagtgtccttgagaccagaggacacagatgactggacacagctcctcacactcacagcatcacacttggagtgtccttcaagtttcccttgcccatgcctttcctgtggtttatcacccagagacttcaaaaataggggcaaaagtccccaaaagacagggattctggatctttcaaggcagactaataatcatagccttgtcaacaatatctcattttggctggaattacttagcatgtgacctcagttcctaccatgtctatgtaaacagtcacattaatattaaaaggagcatagtagaatgcaggggtaagcaaactttttctacgaagggccagatagtaaacgtttaggctttgggggtcactatgtctctgttgcaattagtcagctctgctgttgtagtgctgagccaggctgactacacgcaaataagtaaccacggttgcatttccataaaacgttatttatcaaatgaggtggtgggctggatttggcttatgaattggaggagtcactgcaggctttggagacagatgtttcagttaaacatgtaatgcacgttcacacggagctttggaaaaaccaaaaggctctgagtgaatataacttgcccctccccactcccactgttccaccaccacctccacccagactttccaaggaagatggaaacttttcattttttgacagggagaagggatttttaacatgaacacggtctcagtgacgaggatagttttgattaggtaataagaccttagccattctggatctcagtttcctcgcctaaagagcacttcaatgcaaagtcgccaagcataggggctctaactagtattctggtaccataataaagttgataaagttttcatcagtccaaagtgaagtacaaaaaataaggacacggtagcccccttttcacagggccaactatatctaatgtaagaggcactcttcctctgagacggtccttcatttttgtgtgtcaaaatgtcctttttttacaacatgaagttgatatagacaggagttaagttggcttgttttttgccagagttattttgttttgttttaatcatcacaataggcaaaataaaaagctgtccacttcatattggtctctgaattttcattctggggagaaatttcctgggtctataaagtccaaacttttcacaaccatggacgaaatcacttatcacatttcttcttatctggaccatgaatgggaatatcagaacacaaagtaatcaaaaccaacctcagtttacaattcaatgtttccacaaccagatttttttaaatgctaataatattcggttggtgtaaaagacattgcagcttttgccgttatgttcaatggcaaaaaccatgattacttttgcaccaactcaataatccccatgggactgtgaaacttttgttaaagaccttcccatacctcctttgggttcattctcacctcaaccctgtgagcaagccacagcaacatggggaatagtcttcccattttgcagatgatgcgctgaggcctaaagaagccaggtgatttgcccaaggtcatacaaggagttaatggccaagtgagaatccggggctcctccctcttctccctgcatgaccggcttccaccatgagatgccagtgacctgctggaggcagtacctgactttctcttgcttttaatgcaagtcaacatccccttaattcagcaatctgcagagacactgtagtagggtgaggtagaaaaaatattcctgggctccagaactgaccacatcaacaagtcttttctcctctctgagcctcatctgtaatataacagcaatgtactaaatgccctggaggagtctctccagctttgaccctttatgagactataattcttttgtacaatatgtaaaaatagaagaaaaaaaacctaacaaaaatctcaaggaaatctgaagtcacagcttccttccccaacgaacccagcttaaacaggcacagaagcagtaaattgtcccttttgaaaaaagccattgcaagacattccaggcagaggggaaccatctttcaggtactcttgggaggaagcttcaggggcagcatgtggtttgtcactagaaaggaaaagggcagaagctagacaccttctagggagccctttttcactggctgttgaaaatcttccaccatcagcagaaaatcagcagtggctcagagcctgggatgtagagctatgtgcacatgctaaagaaaaaacacaggatacacttcgctacagaggaaacaccaaaaatcaaacccttttgggtaatgaaaggatttctgagtcctatcacaagcttcccattcctggccaggatagcccccagccaactgacacctcacaggcagtaagccaggaagagcgcctgggaggagaacctttcccccacacccttctcctttctgggttttagttttctcacccagaagacagagttaataatgatttttgcatgaagccaccatgaggatgaaatgggacagcaattggaccctcatctgatacctggttgaacctatgtcctttgggcataggatccactctgttctttcatatccagataaaatgttcccatctcatttcacaaatgtcacggaaccaaggagaatgttgtaaagagagtgaagctcatccttctcctcatcactccttgtttcacttttctgcttccaccaaattttgaatctcatgtctgcacatggtttctggcttatttgcccaaatcagagaagacagccacttttgccttgatttccaagtttgaatagtaacccacatttatgaatagcgacatctacagaaggatttggggtatgcagagaagctggtagggcagtgtagcacatcccagtgcagcccagcagatgacacagaattgaatattaggtccctctgttcttgcaagacctcagctattccagccactgggaatttctcaagggacagctatcctccctggggttcagccctctgacacctgaactgactcactctccttcctgtcttaatgtccttctcccatttcccctccactttccacttccctcataaactctgcagaaattcaaattgttctgactttgatttgcagaatgattctggtcctttgatctcacctctgggccttctcaatataccctggccctttttataacaaatcaccccaccaaatgatagctcttacctgcactagaagaattctgtagtcagtgttctttcttgtactccctcattgcatccgtatgaggccacggcagagtgagaataatgaacgttgacaggcatcactatgtgccaagaattggctgagtacttagtaattcactcatgcagttctcacagtaagcccccaggaatcataattagccccattttataggtaaggaaactggagcacagacaggcttgttgccttgcctaaaatttcagagctggttaggaggggtgagacctcaaatccagcgtatccaccttgcagcccttgtgcttagctgggattgtattgtagaccatctgggaaaactcagtaccgcaaatccttccagtgcccctacctgctggccaagtctacatatccccttccagggctctatcagctctatcacttcttcggcacctgcggcccccagctcttggctttcatgtctcagaagtgcactctctgttaccaagctcagggtcacagagggccacacgcatgggtttgaatgaggtgaagtgctgaggggaaacatggtccatggcgagggttctagaggctgaatttcagctctggctttgcagctgaagggtcatgtgccttgggacaattccttccccactgcctaccagttaagacagatttgtctttcctacaaatgtaatgtagcctccaacacccaaaggttcctggaggccctaaggaagttggaacagtggatagacctcgtgtgggtcctgacaactccaccctcgcctgaattcagtctgtagccaaagttggggtatgaaatgcagaggactggcccaggaatttggaatgctgacattcaagtcttgggacttgaagcaattcactttccctctcagggtcttgggtttcctgttttctaaaatatcagaagtgaggggaacaagccagatgtcctaaccctgagatggattttgctttgattatagcgttctatgaatcaaacaaatatcttaggattctttgaccactttaacattctaacatttgcaattttataaggcgtggcagctaccctccttgcccctccacttgctaaaaagaaaatggcattaaagaagacgaagtgaggttggctctctaattttaccaaatgaacccaccccaaagaaacaataaaagctgcaccttgaaggcagtgacattaatccaagactaggttctcactaagacccaactatccctcatgtcccatggtcacaatcagatgacagccgccctagcggaacaccacactggaagcagtcaagaggcaacgtgcactttgggaggctgaggcgggtggatcacaaggtcaagagatcgagaccattctggccaacatggtgaaaccctgtcttcaaaaaaaaatacaaaaattagctgggcatggtggcacacgcctgtagtcccagctactcaagaggctgaggcaggagaatcgcttgaaccccagaggcggagattgcagtgagccaagatcgcactactgcactccagcctggcaacagagtgagggagggtaagggagagaaagcaggcccattccttgaaattgttttgttatgtatttcattcaaactatctagacacaacatgtgttggcttaagtttctacatttcaagcagcacaaaccatggactagggcacaggactcaaccactgtttggtatagtttgggtggtagacaccaggctcatttttatgcattatctcatttaatcctctctacaactctccatgacagttattttattattctcacttttaagaagaaaacaggacaattcaaagaggctgcatgatttttgcaaagccacacagctagtaatggcagacgtggaatttgaacataagtctgtctaactttctaaaattgatttgaacccaaaacgaactttctaaaattgctgccatacttttgcattttgaacaggtagggagtgtttttttattaaggttattagaatgttagcaaaatttaccctatgtctccagactcacctttccttttaaattatagactttaaagatgcttcttacttacccacagtaatgtcaattcaacctgtgtttagtataaatgaattccaaggaaatgcccatagtgtcagacaggtttactaactgttgcagatacactgcaacaagtcaggactgaaaagaccttaacatcccaaggaaagtaggtggggcagggggcggggggaggcaggatttaaattatttaaaggaattccaacttgaccttaatttatatttactgatcacttcctatgtgctcagtcagcactaagtgtgttcatatgggcattctccaaatccttttggaaatcagggtcacctagtggtcctttgtttaacaaatggtccatcctgcagtttatctctctattactagttggcttagtgatatcaaggaattggtcaaaagcctcaattacttttgcaccaacctaatagttgaaatgacccttgctcaggttaaggactcactttgaatccaaattttatccagaggggagagactgtcctctagatgtcactgttgggactctcctggatattgtccctgaagcctggaatgaagaagccagggcatggcagatgcagagtcattaggataatccctttccttcttggaaggattaaaacatttttcaacaaatgtaaagaggattcagcacacattcctggaagcatcagatagccttaaacacttaggtacttaattgagaagctcccgtccatcaaataatgtcatgagcttcattttaatgagcatttcatctgccaattcactctgctaagtggcattgctaaactgtgccactataacaacaaagaaaagaggagtaaggcagaaagaatctactttactgagtgtctcctctagccacaggccacactgatcacttgacatccacggtctcattgcatcttcatgacatccatacatttaggttgattgttttaattctcacttaatggatgtggcagctgaggctcagtaaggggaaatgacagatccagagctaaaagctatgaccagaattcaggtgctctttttgcgatgcatcgtgtcttccttgttcttatatcaaaggtgctgtacatctggaaggtacctggcactcaaaccacataccatctggccgggatggttggcttggtctgttttgccatggtagagccgccttgagcatatttgcatctttatgtgcccatgacttgtaacttggcagtgttcagcacatgggcctgaagtcatctgctggcattctcccacaagatggaacccaggagctcattagtgcttgttttcccagcacctccagctgtcttgtcagttttcagttccagtgtctgtagtggctgcaaacccacttcttcctgcatttaacccttcctattccacaggaatactgaaagtcagagaagagccctggattagaagtcagaagccctgtgttctgaacccagctccaccatttacctactgtggagtcttgggccagaccctagtctctctgggtagtctcgccactcctaaaactaggatctctgttagcatggcatttagtgaccctttctgtctaatattgtgaaatctcaaggtgagagctagtcttaaggtttccataatcttgaccttctagaatatgctcctttcaccacctcgagcaacctctctttctatctctctcctctgtgtgaaactggccaggagggttttgttggcacatctttctcttcagcctctcaaacaaaaccacagaaagtcccatgatccttctagaagaggctaaagcttggaaagatgatttacaaagctgatgcatctgaaagctttggtcctcagggaagttcaggcagtgctagggttgtctgaaagatagactgccctacagaaagagtaaggagccctggtctctggtcctgtctctctcactaactctctggatgacctaggatcagcctgccataggggcaacattgaggagcacatgggttatgtgttcaccaagcctgaaccaggccatctcagggaactttcatttctccaaactatgcaaatccttacagaaccagactattcataacttagattgtcctcagagctaaaatattctgttctactactgcaggtgtctgaaaacctgaatgtgtgaagacacagtctcctaccttgggtaatgcaacatgcccataaagatagacaggtgcagctgggaccgactccccatcccaaaccttcccacccccaccaccagcaggtctgataggggatggctgagtctatacagcctgctgaaataagctaggtaggccctttaagacagatcatcaaatccacactgctcttcatctattatgttggtgcagaagtaattgcagtttttgttattgcttttaatgccaaaaccacaattacttttgcacaaacctaatagggacactagagcccagagaggagaaatcccaggattctaactcccaggtcatcaactcagccgtgacttgcagacagttctcacttcccccactctgatgctctgttcttcaaactaaacctctccaggcatcactttttgctccctctgctcccagccttcagaattccagggacattgcagaatttcagctgcatgtaatgccactatttataagtcacgtttttctgtcttcataaccaaaaaagaaagttatatcatagactcacagggtgatgagaagactcaggccacacggctgatgacccatgaaatgttcatctagctcttgataagagcctcatgacctccaaagcagcccacctcttttttgagcagcactgactggtcaactctgtgagctgccagcactgtgactcacagtgtgacataggtgtttttagtgtacgtctttccattgctgcatctgagaaatggggattagagcagtgttagctcttagctgagggcttcatctccttcctcttccacttggaggtttagtgcttgggccccacggtgtgccgacagcctcatcaagcattaaaggacagaggctgtgcccttctctggggtcttctccaagtttaacagcccattccctcaatagctcctctagtgtcctgcttttagcccctttctgaaccagctctggcaacatcattcctaaaagggctgcctgtgtttttccctttagctagaaaccatctaaatgatttttaaagaaaaactaaaatataccatgccatttgacttcaggaaatgcaaatgtttcaaaataaggtgttttttttttccatcctcgggtttctcagaattacaactgaggtcaacccaaaggggaaaaaacaacaaaagaaccagaacgtgtgagaggcaagcctgggcttgcacttctccagccacctgtttacagaggctcacctgccataaggggtaaggagaacagtgtaagagggctttcggccaatgagcagagcctgttcttgatgttttgtgctggcctcagcccaaggcatgaatcttatcttcccatctaatctagcctgacctgcaatgccagtgggagaatgaggccctgtgttattctagccctcaggcaaaaggcaagccaagcgtcctgattcacctcactgttgtcctaagtacttactctgtatccacagagggaaacaagaaagatgaactaggtgattcaattcaacaaatatttacagagcatctgctagactgggcagtgggggtttataaacaggagtctctgccctgagggttcactgtctgatagaatgggcaaataggcaaaggaagtatcctggaggagctgactgctaggctgtgtttcaaacaaggaaaaacttgcctggtgaaggaggcagtccaggtagagagcccagcaagtgccaaggtgtaatgataaatcaacattcctaaatggtatgtttagggggactgcaaagccccaaactcccggacagcagtcaggaatccattcgggcagcggtcaggcagcctgagtttggatctctactccacccctgactacctgtgtgaatgtgaacaagtcagttaacctttaaaagggtccatttccttatgtacaagatagacttaattatggtacctctcttatcgtgttattgtgagaattaaatgaaataatgcatgtagcatacttagcagagtacctggaaaatggctatcactcaacatgtattagttatgaccattcatattattatcactgttcctcctcgttattattactattggaacataaagggaaaggggaggagggaaggtgaggggtgagaccagagagttcagtaggagtcagaacaatggggaccatgaaagccatgctgaggagcttgggcctgatcctgcaggcgaaaggagtcagaaagggcttccatgcaaacagacagccaggtctgtctccctggcttgatgttctgcagcttagagtaggaggctacgccaggaggactctctaaccatagtcacagtccattaggagcataagcagccattagtgttggggttctgactacaaaccccaagagtgtgggctgtgggctgcaacaggcaggaccagagcactgatcagaggatgcatgaggatgaaaccaagggaatgacagctgacccactggctctcaccaccaagagagctttggaccagaagctctatgtggatgcagcagataaggaggaaaactgcccctgcttctgcccggagtgcctctcgcagtgagcttgttcagacagcagagggaactcttcatttaactttcaaccactccaaagcccccatgaagctatgaggatggccaggagggactttctcagggctgggcagagactgcaatgggaaaggttgtgagcccagcaggtactactcggcaatgcagtgagcaaatatcccagggtgtggctgctccattgaatgggccgttggctgcctaccgtctgatggatggactacatggtcatctctggtgacatctttgagaagatgtccatgtcaggtcaaagattgtccagttttacacatggggaaaccaaggatcaaagaagagattagctctgaataagttgaattcaagtgtcattgcaggaaatgtataacttgaatctttgcatacaaaatattaagtagttactgtaataaaaaaaagctaagccaccatcactagtgaatatatgaaaaatatttttatttcttaaataccataataacataatattatgtttgcctctgccaaggaagctccaaatagcaggacttctgttaagatttctttaaccctgtgtcctcttaaaattgaacaccaagatgtttttatcttcgttgtctagcaaaatagcctagaacaggaaacctggcctctggaattagccatgggcaattccagcatttacacaaacttgtctgaacttaggcgatggtattgaccacctctaggcatcaaagttaaccctgcaggattagtctgagaactagattagctgatatattacccagctgtaaaagtacccagactagtttctggtgtgtggtagataagttgacagtatttactatcagtattatcattctcactaccactgcctggcaaggcaccacgaaacaatgtatttcacctgcgtggcccccagatttttttcccatctgtaaaaggggcttaataatacccctctcacagagttgctgcaaagattaaggagatgaaatacgtatagtgccaaaaaatggcccctgacacattataggaatggatgtcatatttgtttccttccctgatttccacagtcttccataaaagtccaagtggaagcaatcaataaaaataaatttaaaaaattaaaatcctaaaatacctgatggcaaaatgagaaataaagagcttttctccttattctgaaaatggaaaacagaacggtaattgtctccatcaaagtgttgtagaaaaagatcaggtatttccagatcccaaaacggcaaaagacattttaatgcatcgtctccttatttttaggaaattgctcagaagacctcttatgtatcctgaaaagggctccattcaagaagtcatgggcctacctccaaggtcagtaaccaagcccaggaaacctaaacatatgaaaaccgcttctgtggcttttcagcaacttttaagccagaagtcataattagagtcccatggccaaatgtgacctgcagatgtgtactgtttagtctgcaggaaatttttttgtaatttgaatttgaatgtcttagcggggagagcgtcattctccaaagctacaaggcttctctttcctcagtcccattcactcctttatgttgcctacctggcctctgtgggcattcatggtccccaccaccactgccaccaccagccccacccctcacccctcacccctccttattcagctacctaccaatttcagcaaagtacacagtccttttcctaatgcaagggaggcaggcacttaatctctgcctctatgaagttattcacaagggaaccataaaattgccttgtccccagattgacagcttaatgaacatgtcagcacagggccgatttgcatattgcagtgtgcttcaggtaagaggccccttacaaatgaagcaataagaggcactttagactgcagagtgagaaagagatggccaagattctctgaatagccatcctgctcattttaaaaattcaattttgcagttagattagttctcactcttcagttgaattgcaacgaggtttaaagggaaagcatggaagcaattaaaactagcatgccagcttcctggccctgaaagtcacccttaccagtcagtgctaattttcacgtgttaggacttagagactcaccttccaacacaaacttgtcagcttagagggtctgctaattctctgcttttcaataaatcccagatggcaagagccccttaataagcacatgggggacctgcacaattatttttggctgccctttgaagggaaaaaggcattcaaaaattcagacaatgaaccgttagaggatacatcttaatgtgaaaattaatggcgattctcctggacatcttcaaacctaaattggatattaactgaataatattattgaatgtcctaccttgtactttctgcaatgcctatcaaactcaatattattgaatttcctatctctgataccttttgcaatgaccattcatgataaatgaacataatagttccaatcttgtggagaacagagtccaggagcttatagtctgaaaagggaaagttcatcatattcatcatagaataatataatatgataatgattcagtggaaaaccattctataggaggtagaagtaaagtaccatgtgtgttctgaacctccagctttcagcattgaagaaaaggaagaggggtggttttatacctgtgccttgagtaataagtagactctagagggagtaacatggaagatattcagatgattggaacattacagaaaacatgggtcttgaatgggaaactttgaacaaagacttagaattttgcaatgcgtacctacaatcttctcaataattctgttttctatacttctctttctagtggcaaagcatctaaacaaaaccaagttgtcttggaacaaagatggcattctccatggagtcagatatcaggatgggaatctggtgatccaattccctggtttgtacttcatcatttgccaactgcagtttcttgtacaatgcccaaataattctgtcgatctgaagttggagcttctcatcaacaagcatatcaaaaaacaggccctggtgacagtgtgtgagtctggaatgcaaacgaaacacgtataccagaatctctctcaattcttgctggattacctgcaggtcaacaccaccatatcagtcaatgtggatacattccagtacatagatacaagcacctttcctcttgagaatgtgttgtccatcttcttatacagtaattcagactgaacagtttctcttggccttcaggaagaaagcgcctctctaccatacagtatttcatccctccaaacacttgggcaaaaagaaaactttagaccaagacaaactacacagggtattaaatagtatacttctccttctgtctcttggaaagatacagctccagggttaaaaagagagtttttagtgaagtatctttcagatagcaggcagggaagcaatgtagtgtggtgggcagagccccacacagaatcagaagggatgaatggatgtcccagcccaacctctaattcactgtatggtcttgatctatttcttctgttttgagagcctccagttaaaatggggctccagtaccagagcagctagcaactctgccctaatgggaaatgaaggggagctgggtgtgagtgtttacactgtgcccttcacgggatacttcttttatctgcagatggcctaatacttagttgtccaagtcgcgatcaaggactctctcacacaggaaacttccctatactggcagatacacttgtgactgaaccatgcccagtttatgcctgtctgactgtcactctggcactaggaggctgatcttgtactccatatgaccccacccctaggaacccccagggaaaaccaggctgggacagccccctgttcctgagatggaaagcacaaatttaatacaccaccacaatggaaaacaagttcaaagacttttacttacagatcctggacagaaagggcataatgagtctgaagggcagtcctccttctctaggttacatgaggcaggaataagaagtcagacagagacagcaagacagttaacaatgtaggtaaagaaatagggtgtggtcactctcaattcactggcaaatgcctgaatggtctgtctgaaggaagcaacagagaagtggggaatccagtctgctaggcaggaaagatgcctctaagttcttgtctctggccagaggtgtggtatagaaccagaaacccatatcaagggtgactaagcccggcttctggtatgagaaattaaacttgtatacaaaatggttgccaaggcaacataaaattataagaattcactataccttcccctccctggaactcaggatccaagtctagaaaatgaaaggactgggtttgaattgcttcaaaacctcttccatctcagaagaccagaccctgggaactgagattccagacacaattttggaagctctccaaccaaaataaggcccccctaccccagtatataattgaagacactagtaacacctgactgcatctcatctcagcagagccagaatatggggacaaggttcagggtgccctgctgaatggtgtgaacagcaggatctcaaggatgtaatggaaagaactaccacactgaccatccagaatctaagagaccatctgggtgtttgggaaaccatctgacgaggcctgactctattccagttagattgacaataattgagcagcaggcatttttcatttctggtcaggaaagcattgtgcctttagcaaacaatcagtgtgcaacagtgatgtggtcatctagccagggaatggctgctccatcccctgcataatatattcctgcttcaaacacctctcagaaaaccagttccgcgagggtttttatatccccacaaagttgttgagagacaatgatgaccctggaagtggggaggaggacttctgagaaacagcaacctctctcctgattggggtagccatgagatttctctagctatatccaacttggcatctgtacatcatctttggaggaacatcttatttgtggaaggaccttgacaagccgtttgagatggaatgtaggccctgatgttatgcttcagtaaaaaaagatggaagcttccctgctataccaaaacatggagcaaaatttgcatttttctcaagaaggagagaaaaggagtaggactccagcaaagtttgtcagaaggaaagctagaaaagatttaaaagaaaaaaagaaagaacaaatcagcagtggtggtatggatgaaagggacttgagagaacaaaaatggctaagggaaaattttaagtcatctgctgagcagtgtgctgtgtcaacctcctcctaggtctcctctatgaaatatttagtaaagtctacatttctctttaactctttctgtgagtagattctttgggagaagcaggcattggaagaggtgttgaattcagcaagccaaatggtctgtggtaaaaaacaaaacagactttgagactcaaggctaaaaaaacagggaaatggctggcatttgagtcacacactaactgcataggacaaatgaatcttgcttaaaccaactcatgcattcttgaaaaggtatatgcaacccaactgtgtgttaactaagcaatttttttgccatctcacattctaactcgagaaagattccattttcatttttcaccaactgttctctgagcagaggtacctgacttttgcactgtgagtggtttctaatctcagtctctgtcaagcaatgctaagaaagccaacacctaaagacacaaggggtacatcatttaaatgaataatgtaaccaaacaaacaaaaaaagagaataatcattaataactcaactgatagatatgtagggagtaggcaacccaggaagtttaaaactaaattctgttactcttgagggttaaccagcccctgggaatgttatgagcaaatgatactccatgagtaaaatgatatctatgcaagtaaaataaataatttatctaactgggaactcaggctacctaaaacatatgcctctttggtaaaaactcaacttgagctccttcccttgctcctaccctctgaaccccacctccccaccacacacacacacacacacactcagtgtacttgcagaacttgtagaggaagatggtaagtgagctcacaaaaacataacaagtcaatgtagagtcatccaaactggagtggagtggtgctatcttggctcactgcagcctccccttcctgggttcaagtgatcctcctacctcagcctcctgagtagctgggactacaggcacgcaccaccacacccagctgatttttgcgtttttagtagagacgggatttcaccatgttggccaggctgatctcgaactcctgacctcaagcaatctgcccaccatggcctctcaaagagctaggattacaggcgtgagcaaccacacctggcctctaacccttttctgaatcatatattgaccatgtactgagtctatagaggatagagaccacctgtgtctcacattcaaatcaccatcccagagtgaccggggcgagagcagggaagagcagaggaaacctccaaatgtggggactgtccaaagtaaggttggaaagacgtgacctgaggaattgcagaaaggctataggaggccctatcaaggctggtgggaaataatggagattggaatatgagactgggctcaaatgccagctctctcactaaccacactcgaggacttcgcaagtgtctgctccctgctgggcttccaaccaatgggacttccatcaagcctggcagatctctcaggagtgttctagagatgatacaggctgacttctccatcctcttaatttaagggtttgtcccttccatcccagaataagtggtattcctggaattgtgggaggctcccttgtctgacagattctgccagcttccctcagcacttcctccttttagttcttgtccacatcaaaacctcttagggcactaggctattctctgagccatcctttatgtgactggagattctgagaaggaattagatagtagagttattgtagagtaactactatatatttaattgtttgaatataccatagtttgtccattcttctatgcaagaacatttaatttgcttttaggtttttgctgttacacacaaagctacaataagcacatcttcttcttgcacacctcccacccctagttgccatttttctatacagcaaaaatactcttggaaaattataaatggtgtcacaaagacactgagttaaccatggctagcgagggtttagacacctctgtgatcagagctcatgacctggagcttagtctctggaatctgaatggctccttccatactttctaagtacttctctgctctgtacattcattcaacacacatatcccaagtgccagtgagtgccaggtcagtttacaatccaacatggtatgtgctacagctctgccaagccactgcgaaatcagccctcattagcataggtttgaaacatgcctttcaatgcactctggggcttccctggatctagctctcttcctggagagtaaacaaacaccagaaagcatgaaggacaagcacagctccagaagatttctcccccaagatcaaatgtctgtattcctcatgggctcttctcacaattctcccctgaaactctgcgatggaagattgtcactcaatgtatagtataatgactttccaggttttttttctaccatgacccagaagaagaaaggtcatgttgccaacgaggactaagaaaaaaaaaaaaaaataataacttactgtgaagacctgaattgattttatgatgctctcttaagtcacaacccacatttccaaaatactattctagtgtgccttctcctgctccacatgttggaatgctaaaaatatactttccttattcttttgcagctcaggctctagtattatttagtctgaaatggacagaattttggaatgtttgtccatccagctagcaaggacagctgtggaggtgtttggtttttctgcagcttcgtttgcagaggttttcatgttcaaatacgagcttagtagttggggtgagcctaggtggtgggggagaagcatccgttctgctgatgtagtctgttgcagatgtgcactggttctggagcccggcagcagtagcggcttcctgattgtagtggtttcctgttcgcggcagcagttttgtggttctagaggggcaggcttcctgattgcaagattattgaagagacagcagctactatagcagcccagttcctaggagtcgcattataggtttctcctgaaagctcaatctcgattctgtttcctcagacctcctgacaattctacaagccatttaacaccctgtgataaaccccttcctgccaaacaagctaacgcgaagtctgttctctgcaactgattcctcatgaatataataacaacatgtacaaactgacctcaccattatgtacaaaccaaccccaccatactcatcctgaacttaacactattcctacattccaaatctcaaggactatctcagtctctgaatatccttcttctcacttcctactcaattaacacccaactaattcctccagtttcctagttccagccaccactctcaatacctcctaactcacagcactgcctccagtcttactccttataaatcccatctccagacagcaatagcatctcccgattgttcttggaattgatagtgataataaccatttatcaagctcttacatgttatgacttttcctgcactcacttatttaatcttcaaagcaatccaacgaaataggcatcattgagccaggcacggtggctcaggcctgtaatcccagcactttgggaggtcgaggcgggcggatcatgagatcaggagttcgagaccagtctggccaacatagtgaaaccttgtctctactaaaaatacaaaaaattagctgggcatggtggtgtgcgcctgtaatcacagctacttgggaggctgaggcaggagaattgtgtgaacccaggaggcagaggttgcagtgagctgagatcatgtcactgcactccagcctgggcaacagaacaagactcttcctcaaaaaaaaaaaaaataggcatcattatccccattctttatataaggacattgagagtctgcgatgttgaggagcatggccaatgtcacagtcaatggacggtagagttgggatttaagaccaagtttgcctaactccacattccacgctccagtcactatgaacatagccttcctaaactctaagctctttccaccaggtctctccctatctatctcctgaatgtctctctagttttgtgctcagccccacctccttgtgctctatgatcaaatcacattgcactccttccagttcctccaatcttccatgctctgcctagccaccagaagcttgcagataattttccttctgcctaggatactcctgtcacactcttttgcctgattaactcctatcattgttctgatttccatttcaatgtcacctcctcagagaagtcttcctgactctgctggcttcacttaatgccttgctgtcaccttccatgcttccccatcgttaattgcatgacactttacccttcacccctggttctctctatcattcctctccaacattcaaattcccagaaggcaggaaccctaccaatcttatttagcactgggtaatcacagcccagcccaattcctaggacatagtagatggccattcaatacatatttcttaaatgaataatcaaagaaaaccactttaaacataagtccgttttaaggaaaagatatcaagccataccaaaacaaaagaaaaaaaaaaacagttcttttcaaaatatggaaatgttcattgaaagcctctatttttcttagaaataattttcaggccggggacagtggcttatgcctgtaatgccagcactttgggagggcaaggtgggtggatcacttgaggtcaggggttcgagaccagcctgaccaacatggagaaaccccgtctctactaaaaatcaaaattagccaggcgtggtggcacatgcctgtaatcccagctactcgggaggctgaggcaggagaatcgcttgaacccaggagaaggaggttgcagtgagccgagattgcaccactgcaactccagcctgggcaacaagagtgaaactcaatctcaaaaaaaaagaaagaaaaaaagaattttcagggctcaggagataagaatgcctattagagaaaggtgaaatttttagaaagcagaatctacctgtgccatctgagaacatggaaggaaaaaaaaataaatctttgcttactttattgaaccccttttctgagcaaggtgtggtatatttgctgtagaatccatcacccttcctatctctgagatatctatatgctattctagtcattttgtgattagaaatagtgagattaaccttagaaagttttttaagttttattttatttttgattgacacaaaaatagtgtacatatttaggtagcacagtgtgatatttcaatacatgtatacattgtgcaatagtgaacatatcccttactttaaacagttatttctttgaggtgagaacattcaaaatcctctcttctagatattttgaaatacactagaaagtttaaatcaaaccttggtataccttagaatcctgaaatcccaggccacttcctagagcaattaaattagaatctctggatttagaacccaggcatcaggattattttaagctcccaaatttaagccaaatattaagagtcagtggtttaaatctttgctgttatgtcctggtgcctggtatcaccagagagcttgttaaaaatgcaggcatctcatacatacctaaaaactggaacagaatctgcattttaatatgatccaagagattcaggtgcaccttacaatctgaagaacactagttggttgactttttctggtaagtggagaagattgctggtaatccgttatgtttctctgtttcccccaagtggactttcatgaattggcttggtcttccttgtctgctgcttatgcaaatgtgagggtctaaacactacaaaaccatcaagtcaacgtgatggtattcatttgtaatgatcaccactgaatttttaacaactgcttttgatccaactgtctcccttgggaatattgggcaacactaggaataatctggacaacatgttgaaagctttggatgcagtttagaaacttctatgggggctgtactttccctatagccaaggaaagagaaaaaaacaagtctgagggtggcagatgggaaagaatagtggccttggcaactggaagccagtttcaatctgagctgaagcaattactaactctatgaccttggcaagtcacatggactttgtaaacttaaattttctcagctgtacaatgggaagctgttgggagaacaaacacatagaataagcttggaaagtgtacaactcttggggtattttatcatattcagtgtctgtgaaggagttagaccttggggagaggagtaggaaaaaatgaatcaatgcaagtttgagaaaagtgaaagttcctcaaatccactgaagcctattcccatctgcattcagaaaagccagccattggatcaacaaaggtctctgtcaggccaactctcaaaggatggtttcatcctgcagggaaaactggactagataaccaactgactgtttgcgagatgcagtatcaaggtcctctccctgtgcctctctagaagcagcactgattgcactgcaaatgaacacttttctcacttagaaatgagcacttagaagacaagaagaatccatctccaaatcccagcacccaaatcagtgtcctacacaaagtcagcactcaggaaatgtttagatttcacttgcaacaggaagagggaattaccaggcagggatatcagctaaactagtcaggaacaagctgatttgaaggctgatcctccttcacaaccaggaggctccaaacaaaaaccagctgaagtatttcatcatttcctttccattgctagggacgcagatgacctaacctccttgacattctgactatgccttccgttctcacaatgagtctcattttaccagctggcctgatgcagtcagcgcatggcacagtactcaagggaagaaaggtcacaatccatcacaggatcaatacaatgggatgagtaaacagcaagaaaacactgaaggaggcttcatttctaccaccaacattacattcatacactcacacagtcctcaattgcatctggtcttttcatcctcctcattcattactttgatgtgtttacttaaaccgctttatgttacgtaaatagatataattactatcacttactgaacgcttgcttgccaggtttcaggcaccacatggaagccttcaaatactgtagtctactgcatctcacccttatgagatagagatgaccattcccatgttgcagatgaggaaacagaggctcgaagaaatgcttaagtatgtctaagtttcagcagctcatgagctgaagagctaagatgtaaccactgcagtttggctccagagctatatttctaaccacactacactgcactaccctgaggctacttgacctggtgcctgctgattcctttgtccacaaggtccttgcccttcattcacatcttgttaatttgacctcattcataaaatttcaactcagacattattgctcaagaaccattccgctaaattagacatgcaacctggaccttgatattctcacttctgtctaaaaatttactacactcactatgacagcatgattgtacatttgcctccctgctaaactgtgggcttctgagtaacaacaacgtcaaaatgtatcacatctctcctgccgatatctacaaagtaaagttattctttcttccagattactgtggcatgatcctccaccattcacactctaccctggactctgggaagggacactgctgccttgaaactctacaaccctgaaccttgatgctggttgctgcagacaagaactgcttctaccctgggtcactgtcactgctaagtggaaagtcatgaacttgatggtaccagtcactctgggcctaaaccgacatagccaggaaacggttcaccccccacaaacagaatcatctagacctgtccatgatttggaatcgtggcccaatacttcctggccccagagagagaaaaaagtctgaccaccccctactcaaagtgccaactcatttccttcccagaattaatcacttcccaaaatgtatgactgtgtgaacatcaattcccttcaggggaaaaccccactcccacctctcaggctgtcatcttaccctatgaccccaacctgacaatcatgcaacagcccattattggtaccttttccaatgtttaggtgactcattcttatctacaatcactttgttgttctaggaaagtttttgacacagcaggcatttgatatatatttcttgattaaatgaaagattaaatgaataccatcttagatgtctgcatagtgctttaaagtttacaccactattctttcaaatagtacaagagagaactaagctgtgtactcaactgggaagaagcagaactgagagtgggagcacctggtattctgatttcttgtctagaactatactatattctgagatcactaaactacaacctcaggcgactctgcctacttttgtaaataaagttttattggaacacagccacattcattcatttatgtacagtctatggctggttttatgctgtgatggcagagttgagtagctgccccagagtccaggagctgtttacagaaaatgtctgatggacctgctatatattgctggtgactccaggtatgtttagatatacacacttacaacacacacacacacatacatcataaattttcccacaaagagaaccatatgatcactgtctatctgaccttttcaatattgtcagctgtgagaggggagtaccaactttgttggaatcatgtatagaacatgcctctgagtgctaagggattccatgggctaatgcatgatttttgaccatggacttgataatatctatccaacaatatgaagaagtagtaaacttaaaaaagaaaaggcctcagaggcaaatccaccaaaagcagtgagaaaggaatagcttccaaaaagatcatgttttaaaataaggaggttagagatgtgaggatttttttctttacaaccagtaaaccagagacatgtgaggatttgaatgtcttcataataatgaaaataattttaatcaaaatgtctctaaaatatagacttagaatgtactgttccaagaaaattatttgttcttagatgtttttcttcaatcaaccactcaagggagtttagaagagaccagatggtgccttaaaaggatatgaggccgggcacagtggctcacatctgtaatcccagcactttaggaggccgaggcaggtggatcacttgaggtcaggagtttgagactagcctgaccaacatggtgaaacctcatctctactaaaaaaaaaaaaatacaaaattagcaaagcatggtggcacacgcctgtaatcccagctacttgggaggctgaggcaggagaatcacttgaacccaggaggcagaggatgcagtgaagtgaggcgagattgcgccattgcactccagcccagacaacaacagcgaaactccatctaaaataaaaaataaaaataaaaaaagaaggatatgaaaaaagggaacttaagtggattctaataaatcacaaaacctcatatatagctattctctagactgaattacccagacttctgaaaatatactatcagacataattttaatattcacaggtatcctatgagtttgctctctgctcaaacacagggccaaaccacaacactgtgggtggataagtatgggatatgcctgataaaggcaaggtatcattattattcatctaacatggtagatacttatgaaatatttactttttaacagtagatttcatttatatatttattttctctttttaaaatttttagttgttgtgggtacatagtaggtgtatgtatttatgaagtacatgagaagttttgatacaggcatgcaatgtgaaataagcttatcataggaaatggggtatccatcccctcaagcatatatcctttgagttacaaacaattcaattatactgtttatttttaaatgtacaggtaagttattactgactaaagtcaccttgttgtactatcaaatagtagttcttattcattctttctattttttcttttttttactcattaactattccccacctacctttcagcccctcactactcttcccagcagctggtaaccatccttctactctctatgtctgtgaattcaattgtcttgacttttagaccccacaaataagtgataacatgtgatgtgtgtctttctgtgcctgtcttatttcatttaacataatgatcttcagttccatccatgttgttacaaatgacagaatctcgttcttttttattgctgaatagtactccattgtgtatatataccacattttctttatctattcatctgttgatggacacttaggttgctttcaaatcttagctattgtaaacagtgctgtgtctatgatttctttctgcagtgttttgtagttttccgtgtagaggtctttcacttccttggtgacgtatattcctaagttgttgtttttttgtttgtttgtttgtttgtttgcagctattataaaagggattgatttcttgatttgattctcagttttgtcattgttggtgtatagcaggactactgatttgtgtacattaattaattttgtatcctgaaactttgctgaattcatttaccaattctaggagctttttggatgagtctttatggttttctaggtacacaaccatgtcatcagcaaatagcaatagtttgacttcctctgttaatatctcttttaataaactttctacccgtatctctttctctaactcctctttaaggccaataactcttagatttgctcttttgaggctactttctagatcttgtaggcatgtgtcattgttttttattcttttttcttttgtctcatctgtgtattatattttccaatagcctatcttcaagcttgctaattctttcttcttcttgataagatctgctattaagggactctgatgcattcttcagtatgccaattgcattttttcagctccagaatttctacttgattctttttaattattttaatctttttgttaaatttatctgatagaattctgaattccttctttgcattattttgaatctctttgagtttcctctacacagctattttgaattctctgtctgaaaggttacatatctctgtttctccaggattggtccctggtgacttattagttcatttggtgaggtcatattttcctggatggtgttgatactagcagatattctgtagtgtctgggcactaaagaattaggtatttattgtagtcttcactgtctgtgcttatttgtacatatcttcttgggaaggtttttcagatatttgaaaggacttgggtgttataatctaagccgtatctgctttagggggcaccccaagcccagtaacactgtggttcttccatactcctaaaggtactgccttgatggtcttggacaagatccaggagaattctgtagattaccaggcagagactcttgttctcttcctttactttttcccaaataaacatggtctctctgttctgagccacctaaagctggggctggagtgacacaagcacccctgaggccaccaccactatgactgcgctgggtcagacctgaagccagcacagcactgggtcttgcccaaggcctgctgaaaccactccctggttactgcttatgtttgttcaagaacttgaagctctacaagcagctggtggcaaagccagccaggcctgcatccttcccttcagggtggtgaggtcccccaagccccagatgagtgcagaggtgccgtccaggaatcagagtcaaaaaccacagatgtctgtctggtgttctattgtactgtagctgagctgacactcaaaccacaagacacagtactttccatgcttccctctcctttccaaagataggggagccccacccagtagccaccaccaccccaggccacgaggagtactgccagactactgccaaagttttcttaagtcagcttgtggtgcatgctgcctggcctgggactcactcatcagggcagtgggctctcctctgacccagggcaggtccataaacaccatccaagaatcaagtcctggaatcggggaccccaggatcccacttggtgctctacccaactgctagtatctaaggtgcaagacaagtcccctttacttttccctctgcttttctcaagcagaaggagttttgccccatatccacctcagctggtaatgtgctgagtctcacctgaacccagcaagtcccagaggcttaccctaggccctcaaagtagtacctggacatcaccgatgtttattcaggactcaagagctcttcagttagcagatgatgaattctgccaggactgtgtcctttccttcaaggcactgggttcccttctggcccagggtatgcctataaatgtcatctgagagctagggcccgggacaaggacctcacaactctgtctggtgccctctcctgctgtggctaagctgctatccaatatgcaagacaaagtccttcttattctttcctctcctctcctcaagcagaaggaaggggtctcttctggagccaggaggtgtgcagcctgggtctaggggaagggtgatgccagcactcccttggctgatgcagctggtgtctctatgtcacatgccacccagtccgctgtctctggccccagtttggcactaggactcacctaagagttgcaggccttatggcctagactgcctttcaagtttacttggagacacagagcactgtagccctcagtggtgaggtttgcaggaactccagtttggactgctaagattcgtgattccactctggctagggctggtttaaatgcttcctcggtgggtgggcatcagctgatttttgtccagttttcctttctgctctaacaagacagcactgagttcaattgcctcacaattgctgtgctctccctcccccagcacccagagaaactctccacaccacggctgctgcagggtgggggaggggtgacatcagcaattcagagctgttttttctatctcctgagtgcctctttcagcaatttgaagttagaaccaggtactgtgagtgctcacctgatttttggttctaacaaaggtattttttggtgtgtagatagttgttaaattggcgtccctgtggggaggacaatcattggagcctcctattctgccatcttgctccacatcccttgatttgaatagaagctgcaattacctttaaaaaaatttctatccgaaattttgtcctcttggttcaagctcttttccaagcaaaaatattgtacccaaatactccttaaatgagctacataggcatatatttttaaataattaactcaagccctcttttaaataaaggattaataagaatagtgttctatttgagtaaacatgtagtatagggaaaaattgtgagactttgaaatttagtgagagtactgactagctcattaattttggttattttatgctttcattggctctgggatttgttttacagccctgaaagttgcagaaaatagatagtaatgcaaataattcttgtccgtaaatatgcaagttgtgtcccatgtgatgcaactgattaccactctgtaaatattgaccagttttgcaagtttctgtctatttgtaacccctattccatccagcagcacctattactatctatagagaaccttcttttggtccacactctgttgtgcagttactaactcaacaatgtcatatacgcacacatatacaagcacatacacaccagtgattacaaagtcaatttatagtataatagtggtttgactatttttaaatagtatttttattaagtaaatacaattgttttggtatttttaatctgaatattgaaatgcaggagaaaactaaatgctgcatttaaaatgaggcatcattgtttccatttcattgacgtagggaaacagaatcagaaatgaaaatcacccacctgataaataaatgcagtagccaggacactaacccagattttcagagaccaaattagttacattctatttttttgagggaagctttctttatctctttctccaaatactcaaagaagtaaaatctctgtatgataaagatagatctattatatctagaatatcaacacttcaaaaagcatcagactaatagtatttcagaaacacaggtaaaaaaaacactgaaatttcaatattattgttttgctgtggtatttcagatagcaaattcaactagcacaaaggaaatgcaagaaaagcacaagacccagatgtgtttttaatgaagcttaaaaaataagttgcaaaataagtcacatttttatcacaaaacatcctgataaaagtataaaataacatatttaaaagcccaataaatgcaataatataagctaataagaatagtgaacatgtgataggagtttactgagagccaggcactcactggtctaagtgcttttacattcaaataactctttcaatattcacaggtattctatgagattgatcctatgattattcccaatgcaaagataagataaagaggacctgagggactaatttaattcaaggaatgttatgggaatgtagaagtggtagaactcctgtggtaagtccagggagcaatcctgtggggtttggctttggagggcttcacccttggccagccagggaagaaagatctacaggagaaattagctgtgccgatctgatggtgctgagaaaaaagtctaggacttcaaagagggaagggtactgtgtagctttctgtcagggatgaagcttggctaaggtacagcaggaagaacatggagaaggaaagggtaatggaaagagagctggataagcagaagaggaaggaggcttaaatggcccatgaagatcatactttaaaaatatatttctttgacagatgttaaaacttctttgtgactagtttatttaaaatttgttttattttaaaatactgaatataatgaaactaataaaggtaaaagtatctcttaataccgctattaaagtttcagaagtggtgagagctacctctttctgcattcaggctcttgaacaaactgaagagtaaaacaaatattaaggcagataggaaattaaaatatcaacttcatgactatgaaaggttaagttggaggatgcagcttagcttcagagccagaaagaccagctctgctagctgaatctcagatctaggtaggcttgcctgtcatagcatcactgaatcctgggcaagtacaggggattcctaagagaaagataaagagagcagttgaaaggaacatgcctgctcttttcctcccagatttatgaagcagataagttattccaccatccctgtgacaaagtgaacaaaagcaaagaaagacatggagttaaactaactgagcttccttcatgtgaaagaaactgctagaaaacagaagaagtgtttctcgtcaacagtcatccctctttaaatagtttatactaagaaacaaaagaaccatatatgttaaaaacctacactaaaatcatactcagtggtgaaatatagaaggttttccctctggttaggaacaagataaaaatgtccgttagcatcaatcctattcaacattgaactggaggtcctagccagagaaataaagaaaaagaaataaattatataaagataaatgaagtgacacttgtatattaacagatggtacaaatattatagttaaaaaattataatacaaaagatttataaacaaatgaatttagcaaagttgctagatatgaagtaaatatacaaaaatcaattccgtttcttttttcacttttattttagtttcagaggtacatgtgcaggttttttatgcaggtaaattgcatgtcatgagggtttggtgcaaagatcgttttatcacccaggtactaggcaaaggtagtttttagatcctcactctcctcccaccctccaccttcaagtaggccccagtgcccattgttccctttttttgtgtcaatgtggactcaatgtttagctcctacttataagtaaaaatttgtggtatttcgttttctgttcctgtgttatttgcttaattctatttcttatactatcaacaaacaactagaaaataaaatttagaaaaataaaccatttacaatagcactcaaaaatatcacatacctaggaatatatctgatgaaaaatgtaaaaccctctacactgaaaattatacaatattgctgagagaaagtagagacctagtggagagagatggcacacacatgagttggaagattaaatataaaataatgtaaatcctccccaaattgatccatggaatcaatgttatcacagttaaaatcactacaggtttttttgtatggaaaatgacaaaatgtttgtaaaatctatttggaaatacaaagaacctaggatagccaaaataggtttgaagaaaatgagcaaattgcaagtcttactgttatagtaggtagctcatcaggcataagcagggtagaagagggctctctccgacttcacactccccccccacctcctgtcacacacatcaggaatgtcaggtgacaatcaggtaatggtcagtaatggtcaggccgttgttaactgtctctctaaaataataattggtcacagccagtgccagggaaaggccatctcctgctacatagaaaacacctgaaactagtgatcagcagcttcctggagttgggaaagtggactcaagcatgtgcatgcagacagcccaacccaagggaagaatcaaaggagaagtgacgcaagaccccggaagtatgccaacatataaagccaaagttaaacataaaaccaaagtatgccaaagtaaaacaacgtcaaaaagtcaaaccgcacacttgtctttcaagtcgcccgcttggtcctcttccaagtgtactgtctttccttcctttcattcctgctctaaagtttcttaataaacttttactcttgctctaaaactttcctcagtctctcctgccttgtgctcctctgttgaattctttcttctgaggaggcaagaattgaggattctatagacctacatgggttcactgccagtaacattactatcagatgtcaacttaactatatagcaaaggtaatcaaaatactgtgggtgttagcataagaatagaaaatatagtcaatggaataaatcaacacaggtattatcatctgaattgtgacaaaagtctcagtgtagaaacaatgccctttttaataaatgctgttggaataattatatctgtaaaacaaatcaactttgactcccccaccttacaccatacataaaaattaatttgagatagattacagatataaatgtaaacagcatgacaataaagcttctgagataaagtataggagagtactttcataatattgaaatagataaaatattttatacagaatatgaaagacacaaaccataaaagtaatgaaatgctattcactacaattaagaccttctgctcatcaaaggacaccattatgaaagtgagtagaaaagccacagattggaaaaaactttgctctgtgacaaaggagtcatattcacaatattatgtataaaaattcctataaatcaattaaaaagacaaatcaacctaattttaaaatgagcaaaacaattgaataggacttcaaaaaacacactatccatatgtccagtagctaatgattccctgatggtatcattagtcatcagggaaatgcaaattaaagccatataaccaccaaattaaaactactacacacccaccaagttactaaaattgagatgactgacaatatcaagtgttggtgaggaagtgaagcaactggaaacctcatatattgctggaggaagtgaaagtgttacaatcattttggaaacctgtttggcaatacctactaaagctaaacatatgcttgccttatgatccaaccatgctactccgaggcatatttgtagaagtgaggtcatatgtcaacaaaaaagatgggtagaataatatttgtagcttctgagcaaaacaactgtctctgaatattaccttactttggaaggtattggcatacatttgaattaaagtcagaatttttcaaaataagccctaatttaaaagactattctatattcaaagtaaaacaatattaatagaactttcctttgcaaaaacaataaaggaaacaaggcatttt

SEQ ID NO: 1412 - DNA, 1839 bp, Homo sapiens
aaccgtcattttcctacgcgccctctgacatcagccaccttctctgtagctagtttctctgcacacaacttaatccctggcaatgaaaaatgaacctctcccccacccttgctgccgcctctcgcctcacgcccccagagaagagtttctccaccaggcagcaggtgaaggtttttttccaagtcacatgattcaggattcagggggagaatccttcttggaacagagatgggcccagaactgaatcagatgaagagagataaggtgtgatgtggggaagactatataaagaatggacccagggctgcagcaagcactcaacggaatggcccctcctggagacacagccatgcatgtgccggcgggctccgtggccagccacctggggaccacgagccgcagctatttctatttgaccacagccactctggctctgtgccttgtcttcacggtggccactattatggtgttggtcgttcagaggacggactccattcccaactcacctgacaacgtccccctcaaaggaggaaattgctcagaagacctcttatgtatcctgaaaagggctccattcaagaagtcatgggcctacctccaagtggcaaagcatctaaacaaaaccaagttgtcttggaacaaagatggcattctccatggagtcagatatcaggatgggaatctggtgatccaattccctggtttcaggcaccacatggaagccttcaaatactgtagtctactgcatctcacccttatgagatagagatgaccattcccatgttgcagatgaggaaacagaggctcgaagaaatgcttaagtatgtctaagtttcagcagctcatgagctgaagagctaagatgtaaccactgcagtttggctccagagctatatttctaaccacactacactgcactaccctgaggctacttgacctggtgcctgctgattcctttgtccacaaggtccttgcccttcattcacatcttgttaatttgacctcattcataaaatttcaactcagacattattgctcaagaaccattccgctaaattagacatgcaacctggaccttgatattctcacttctgtctaaaaatttactacactcactatgacagcatgattgtacatttgcctccctgctaaactgtgggcttctgagtaacaacaacgtcaaaatgtatcacatctctcctgccgatatctacaaagtaaagttattctttcttccagattactgtggcatgatcctccaccattcacactctaccctggactctgggaagggacactgctgccttgaaactctacaaccctgaaccttgatgctggttgctgcagacaagaactgcttctaccctgggtcactgtcactgctaagtggaaagtcatgaacttgatggtaccagtcactctgggcctaaaccgacatagccaggaaacggttcaccccccacaaacagaatcatctagacctgtccatgatttggaatcgtggcccaatacttcctggccccagagagagaaaaaagtctgaccaccccctactcaaagtgccaactcatttccttcccagaattaatcacttcccaaaatgtatgactgtgtgaacatcaattcccttcaggggaaaaccccactcccacctctcaggctgtcatcttaccctatgaccccaacctgacaatcatgcaacagcccattattggtaccttttccaatgtttaggtgactcattcttatctacaatcactttgttgttctaggaaagtttttgacacagcaggcatttgatatatatttcttgattaaatgaaagattaaatgaatacc

SEQ ID NO: 1413 - protein, 157 aa, Homo sapiens
MDPGLQQALNGMAPPGDTAMHVPAGSVASHLGTTSRSYFYLTTATLALCLVFTVATIMVLVVQRTDSIPNSPDNVPLKGGNCSEDLLCILKRAPFKKSWAYLQVAKHLNKTKLSWNKDGILHGVRYQDGNLVIQFPGFRHHMEAFKYCSLLHLTLMR

SEQ ID NO: 1414 - DNA, 2228 bp, Homo sapiens
aaccgtcattttcctacgcgccctctgacatcagccaccttctctgtagctagtttctctgcacacaacttaatccctggcaatgaaaaatgaacctctcccccacccttgctgccgcctctcgcctcacgcccccagagaagagtttctccaccaggcagcaggtgaaggtttttttccaagtcacatgattcaggattcagggggagaatccttcttggaacagagatgggcccagaactgaatcagatgaagagagataaggtgtgatgtggggaagactatataaagaatggacccagggctgcagcaagcactcaacggaatggcccctcctggagacacagccatgcatgtgccggcgggctccgtggccagccacctggggaccacgagccgcagctatttctatttgaccacagccactctggctctgtgccttgtcttcacggtggccactattatggtgttggtcgttcagaggacggactccattcccaactcacctgacaacgtccccctcaaaggaggaaattgctcagaagacctcttatgtatcctgaaaagggctccattcaagaagtcatgggcctacctccaagtggcaaagcatctaaacaaaaccaagttgtcttggaacaaagatggcattctccatggagtcagatatcaggatgggaatctggtgatccaattccctggtttgtacttcatcatttgccaactgcagtttcttgtacaatgcccaaataattctgtcgatctgaagttggagcttctcatcaacaagcatatcaaaaaacaggccctggtgacagtgtgtgagtctggaatgcaaacgaaacacgtataccagaatctctctcaattcttgctggattacctgcaggtcaacaccaccatatcagtcaatgtggatacattccagtacatagatacaagcacctttcctcttgagaatgtgttgtccatcttcttatacagtaattcagactgaacagtttctcttggccttcaggaagaaagcgcctctctaccatacagtatttcatccctccaaacacttgggcaaaaagaaaactttagaccaagacaaactacacagggtattaaatagtatacttctccttctgtctcttggaaagatacagctccagggttaaaaagagagtttttagtgaagtatctttcagatagcaggcagggaagcaatgtagtgtggtgggcagagccccacacagaatcagaagggatgaatggatgtcccagcccaacctctaattcactgtatggtcttgatctatttcttctgttttgagagcctccagttaaaatggggctccagtaccagagcagctagcaactctgccctaatgggaaatgaaggggagctgggtgtgagtgtttacactgtgcccttcacgggatacttcttttatctgcagatggcctaatacttagttgtccaagtcgcgatcaaggactctctcacacaggaaacttccctatactggcagatacacttgtgactgaaccatgcccagtttatgcctgtctgactgtcactctggcactaggaggctgatcttgtactccatatgaccccacccctaggaacccccagggaaaaccaggctgggacagccccctgttcctgagatggaaagcacaaatttaatacaccaccacaatggaaaacaagttcaaagacttttacttacagatcctggacagaaagggcataatgagtctgaagggcagtcctccttctctaggttacatgaggcaggaataagaagtcagacagagacagcaagacagttaacaatgtaggtaaagaaatagggtgtggtcactctcaattcactggcaaatgcctgaatggtctgtctgaaggaagcaacagagaagtggggaatccagtctgctaggcaggaaagatgcctctaagttcttgtctctggccagaggtgtggtatagaaccagaaacccatatcaagggtgactaagcccggcttctggtatgagaaattaaacttgtatacaaaatggttgccaaggcaacataaaattataagaattcactataccttcccctccctggaactcaggatccaagtctagaaaatgaaaggactgggtttgaattgcttcaaaacctcttccatctcagaagaccagaccctgggaactgagattccagacacaattttggaagctctccaac

SEQ ID NO: 1415 - protein, 230 aa, Homo sapiens
MDPGLQQALNGMAPPGDTAMHVPAGSVASHLGTTSRSYFYLTTATLALCLVFTVATIMVLVVQRTDSIPNSPDNVPLKGGNCSEDLLCILKRAPFKKSWAYLQVAKHLNKTKLSWNKDGILHGVRYQDGNLVIQFPGFIICQLQFLVQCPNNSVDLKLELLINKHIKKQALVTVCESGMQTKHVYQNLSQFLLDYLQVNTTISVNVDTFQYIDTSTFPLENVLSIFKNSD

SEQ ID NO: 1416 - DNA, 64482 bp, Mus musculus
  misc_feature (1)...(64482): n = A,T,C or G
gttagttgactatgttggtactcctgtggagtgtctatcccttttgaggcccaaaatcctttcagatcctattcttccccaagagttcccaagctgtttgactgtgggtatctgtatctgtctgagtcagctgctaggtggaacctctcagaggacagcgtgctcctgtctgcaagcataacatattgttattaatagtgtcagggtgtttgcccatgggatgggtctcaagttgggctggttactggttggccattccctcagtctctgttctatcccccatgtctgcatttcttgagccagggtaaattttgggttgaaagttttgtggttgggctggtgtctctattgttccactggggttcctgcctgattacaggaggtggcctcttcaggttccatattcccaatgttgtgagtcatagataaggtcaccccattgactcttgggtgcctcctttatcccaggtctctgtcttctcctggagatggcccctacctcctcaccttggtcagttacagatttccattcattttcatggccatctagttatctctcctgtccttctccacacataatcctgatataacaccaccatcccccaattcccttcctcattccccactacctcccaggtctctccctccatctgcctcttaggactatttcattcccctttctaagtgagattcaagaatcctcacttgtaccttccttcttgtttagcttctttggtaggcaaaaagagggaaatggtgcagaatattttatcacattgtgaaccccaagactgtggactggaagatcctgtttcttgttgtggtgttgttcagtcctagcacacacctttaatccaagagctttctgtaaatgggattaaataaagtcgaccatagctcaagaggcagagcaagcatcagctgacaggaagtgaacataagaaaacacaggaagtagaaaggagttaaagatgatgtaagacagtgtgggggagcaagagcttttccttctgggacatcagaggggtaggaaaggcagttgggtgctttctctgcctctctgagctcctctctgagctagcaggctttcaccacaacgtctggctcctgagtcttgattggtaaaattcaatgtttgggtttttttttcttttctttttaaacaacaggaaaatgtgacaaggggtactccgcataggggcttgtttggctgaagtgggcagctgagtctttgttatgctctaagctggaagcagcagcagtcaggctgtgcttgactcagaatcttttggccccattctccagagttcttctgagaaaacagcccatatgaggcctgacacttgccaatgacttagcaaatggtttctccagaaatgatttacatataaccgtccttcaggaccctgaccagaagcagtgactaatggtggcttttcagagttgaggggcaggccagtaggtggagcctcagttcaccagtccttcctctggcttctggaaccttgaccttcacaagagccaaggatactagtttctggaaaattcaaagtagtgagatgcaatttgccttggggcccctcagatacaggctgcttcttgtgagactcgggcactcgcccgggggaagatgaatgaataacagggaggtggatttcctcagagaagtttctgtacaacagagggtcatggggattccatggcaactagggacgtgtgctatgaccgtgcgtgtgtatgtgcacgagagagagagagagagagagagagagagagagagagagagagagagagtttatattgcagcaaccattctagacaaggtaaggtttaccctggagccctggctctgtgggtgcgctgtggctctggacaagctggccaagtcacttcacaaagtatctattttcccagagttgaaaccaattatctctttgcaagcctactgtgcatactttgtaagcttatgggatttattttctttctgcatatgtgtgtgtgtgtgtgtatacatacacatgtgcgctctcgcacacgcgtacacacgcacacacaccacgtgttgttgtgtgttactgtgttgctaagcattcaacccaggatgccaagcatactaaacacgtgctctgcccctgagtgactctcaggctcacatttcattcatttttccaaacacccacatttgtcagacatggaacatgataggcaaaatccatgatctggtattctatcaagataccagcagacccagaccttatttcttccatgtctcagtaggggcataacttcccagaagagagaagaaaggtcctgtgagaggtaatcctcctttcgaagctaagatcatgccacacacccctcaggtctcatcgccccacagggtcacgcccatagaaacatttctgtaggcatctcatgattaaactgccgctactgactgttggttctgtttccttattctgctcagtgcctctgagtccatgattaatagtggaccaggctgggtttcctgcaggtctaaatgactcacttccattcacagtggctttagtgagctcaggatgcctaacgtttaacccttatttattatgtgcatgtgtatatatgtgtgcatgtgtcatactgcatttgtgactgggttcagtctttctaccatatgtgttctgggggggtccaactcaagttttcaggcttggcaccaaggacctttattttgagccaccttgccggttcttcccaggcctcatcaagggatgttaggatcactgactcccagcctccattttagacactagggtgataaggctcaagacggggagtgatatgatgtcaacctgggctccactaagtctccagaccctccctggggtctcctatacctctcagactgaagcctaaacttggtgccagaggccaaaggaagtatcttttgggaaacatgtgaccagcaggctgacctgactagaggagcaggaaatagacacccatctgacaaccctgagggtccaggaaaaaccatgaggcctggttctctcccacagacccaccacagtgcctaaacccctctgtgtgtcacatcttgatggacaagcaagtatcttggaagaaggggaagtccaggttctgctccagagtggtgagacctgaacctgtggtttgtgctgctgcctaaggactcagacttgggagacaacagagatcagagtcctttctatttctctcctcaaatttgcaaaagtgtcctaaaccaggtaagtatggtggtacatatctgtaatcttagcactcaggaagtaggggtggagaactacaagtagaaggttatccttggctatataatgagtttgaggccaccctgagctatttatttttattttttaaatttattattagtgttgttattattattagtgttgttgttattgttttcaagacagggtttctctgtgtagctctggctgtcctagaactcactctgtagacccggctggcctctaactcagagttccacctgcctctgcctcccaagtgttgggactaaaggaatagccaaatgcctggcttcaagactatctcaaaaggagccacacacagacacattaaaggcatggtgagcccataatctataataactgtgagttgattgcccggtgtgtgacagttcatgctaggcagaggaataagctagaatctgaatatagttccctctacactgaggagaatggcctgtataacaacagaaggttctggaacctgcactgggagactaggttatcaaaaaaacatggtggtctctgctttgcttaagtgcagtcatttccttgggagacagccaaaactcaatagctctggatactgtgacctgcccttagccataagtgtagctagaggatccatcctccagcccatctgtctgtcccttgactgcaatcccaaagggaaggaacatgaagccagagccacttccccacctcctcccgtccacccccacccattcttagcaagccctcccacattgctctccagcagaaagtgctaggccgtgaatgtgtcccacaggtttaggcacataaagtgaaggcaatggtagcacacacatgatacactccaggagaagtggtgtgcccacagtcgggggacccaaaaaagtctcctccccacgtgctctttcttttgagcaaaaaccagggtaagagaggctaagggaaggaagagaaggacaaagcttgaaccaaatctttgctctcccctgtgtggactctgggaaggtcctcagcaactctgaaccttcttttggtcacctataaaaggaacagcaggtaattcttggctgtagagcaagttcaagaccagcctgagtcacatgagaccctgtttgaaaacaaaacaaaacaaaacaaaacaaacaaagaaaaaaactcaaacaggaatccagagagacagagagacgaggggcacatttttatttttctgagggtaggttccccaaagatctaagaacctctggcttggtcctatctcttcaagaatccatcagcagcttccacactgccacactggagaccaagctgctaacacatggacctttgggacactaaatgatatcaggccttgtgttcgatgaagccctatatacggcacagctgtctgggacccagctgtgagaggggctaggcatgagcccatgaagccacctaatagagagccctgctttatcaaggttctcaaagaaaatcacttgtgggatgttgtagcttacttggtagacagcttgcctggcactcatggagtaaaaactgagtatagtgatacatgcatgtaattctagccctgcagaggtggaagcaaagggagggagcagaagttcaaggtcatgcttggccttagtgagttaaaggccaacttggggtacctgagagcctatttcaannnnnnnnnnnnnnnnnnnnnnnnnnnnnnnnnnnnnnnnnnnnnnnnnnnnnnnnnnnnnnnnnnnnnnnnnnnnnnnnnnnnnnnnnnnnnnnnnnnnnnnnnnnnnnnnnnnnnnnnnnnnnnnnnnnnnnnnnnnnnnnnnnnnnnnnnnnnnnnnnnnnnnnnnnnnnnnnnnnnnnnnnnnnnnnnnnnnnnnnnnnnnnnnnnnnnnnnnnnnnnnnnnnnnnnnnnnnnnnnnnnnnnnnnnnnnnnnnnnnnnnnnnnnnnnnnnnnnnnnnnnnnnnnnnnnnnnnnnnnnnnnnnnnnnnnnnnnnnnnnnnnnnnnnnnnnnnnnnnnnnnnnnnnnnnnnnnnnnnnnnnnnnnnnnnnnnnnnnnnnnnnnnnnnnnnnnnnnnnnnnnnnnnnnnnnnnnnnnnnnnnnnnnnnnnnnnnnnnnnnnnnnnnnnnnnnnnnnnnnnnnnnnnnnnnnnnnnnnnnnnnnnnnnnnnnnnnnnnnnnnnnnnnnnnnnnnnnnnnnnnnnnnnnnnnnnnnnnnnnnnnnnnnnnnnnnnnnnnnnnnnnnnnnnnnnnnnnnnnnnnnnnnnnnnnnnnnnnnnnnnnnnnnnnnnnnnnnnnnnnnnnnnnnnnnnnnnnnnnnnnnnnnnnnnnnnnnnnnnnnnnnnnnnnnnnnnnnnnnnnnnnnnnnnnnnnnnnnnnnnnnnnnnnnnnnnnnnnnnnnnnnntctggggacttggcttctgcagcaggtgtaggcctctgcagtcccacacagaagcctgctgctctcaaactagggacttcccctcctggtcttcaaagcactttcacacctgcttaggggttcatgaactgcctgggacctactgaaggcaccagggcctctgttctgagtcccaggagcagtcacttccatgggatgcttacctctcaccctttgcttaagatctctcccacaaactcactgcctacaaactcactgctttctctccagctaggtactcactgccatagccacctgccagatgttatcttcagtgcccccaagcactctgtttctccaagaccccacactgtcctaaggcagaaggacagcatgctacaacatggttagatcagctctagaattaaaacacaaaacaccagaaatggccttttggccaaaaagtagagggagctgcccttagagtgatggccctggggtctgagtgtagagtgtggtaggcaggaacaaaggttgagggggggatctagaaggaatgtgagagaacacagagtatgaagtgcagtggaagagactctgaatgcttttctcttggggtgatgtaaatgtgctcacaagtaggatcttcatgacatttctaagaggatttaagcttcaggcccctgtaaattcttagcacaaggtaagcagacaaaatgagcaatagtctgcagtgccaaatcaagaatacagggctggtgaggtgccctattgggtaaaagcacttgcaagagtgcctgagtgtatggagaggcaggaagcagtaaagaagccattgaaatggccatcccatggcataattaagggaaatatttttgtttgtttgtttgtttactgtgaataggagaaagaaaatatccagagacatttgaaagagtccagagtggagagaaagagaagcagactggacacggccagggtgatctgtaaaagaggtgagcgtggtaggggatggagaagggtatgggtgtagacaaatcccatagattataaggacattagctgggggaagtaaactagtgtggactttgaaatgaataacaagtactgtaaggagggactgaggaaggctggagactggcataggcaatcataggtatatgtccctggagtccatgtccctcagcctgagatacaaaatgaccccggtggagatggaactgtttcacaagatctcgaggaaaactggcttttctctaactgccagagatccttctatgatccccattataagacatatgggctgtctgagaccaaatacagaccacccactggccatcagagttcgatcctctctgaaacacgtaaaaaaacagatgagatggcaacacacttgtgatcttagtacttcttcagcaacatgggatgtcttgggccagctagcctggagtcacagtactgcagcagaaacaaaagagaccctgcctcagaacaaggcaggaaaggaaagccaactctggaaagctgtctctgaactacacccattccctgtgcattcagactcacatacatgtgtgtcacatgcacatgtatataccctaaaataattagccagttttttaaaagaataagagtctccaggcgtgaggccctttccccacccagccatagtgaacctctgccagggtctatgccaaacaaagaaacaaaggcctagggagcagaagttacctgtattgggggaggttagcagggagagacaaacttttatatgcacagtgtcttagtcagggtttctattcctgcacaaacatcatgaccaagaagcaagttggggaggaaagggtttattcagtttcacttccatactgctgttcatcaccaaaggaagtcagggctggaactcaagcagatcagaaagcaggagctgatgcagaggccatggagggatgttctttactggcttgcttcccctggcttgctcagcctgctctcttatagaacccaagactaccagcccagggatggtcccaccctcaaggggcctttcccacttgatcactactaattgagaaaatgccttacagctggatctcatggaggcatttcctcaactgaagctcctttctctgtgataactccagctgtgtcaagttgacacaaaactaaccagtacacacagtattatcactttgaatgggtgtgtaatagtccataaagtgggtgaacctcagtttccaaactcatttcctactgcaactcggagtattcccaacatttacagatacagtttaaagagacattctcgaatctatagtctttttgttgtggttgttcatttccaagttgagctgtttgttgatttttcattgtttgggttgtgaaattatggagcaatgagttgtaaactttctaaaaaattttgttcttttgcttttgctaacaaggactttttgacaaggatgctttctgagagcggttgcaccactagtcagtacagaagaatgaagttctgttttctctcgctttcccccgtaactattattatgaattaaaaaccccacaaatgacttgaaggcccagaagactaacaaaggctgctttcatttgcatgcctttggttactaggaaggttggactttcacaatgtgtgttttttatttggttcaagctggtgcaagctatttggatgctacatccgtgagtgtcttacctgcaccagttcattgtgaacacctgctgcattttgggaagcatgggctccaggttcctctgccccttcctgaccctgtgattattcgaagctggatctttcatcatcagggaggggagggtctggagtggctctatggaagtggcacattaggggtggattttccaggtaggatgtggacctcaaagaggcctatgtgtgaaatggaaagttcgtagggactttggaaaatcctgttaggaagtggcagctggtgccctgtgggaatctctaacaacactgaaggctagactaaaatgtggaagccaaaaggcccttgcatcattctgggcttgaaagaagccgctctcccatctttagagcacataggtagcatgcctgttttctcagtgttggtttttatgtttgaaaacaaagcaataccagacaaaagcagtgagcacctgctagtcagtgctcagcagtgaccatgtgctgccagtactcacagaagcaatcaagagagcctggagtccggggagccccacattcgaacagcagcttggggaatagaataaggcagacttcaggtgaggctccagggtgccagctatatccacctggcaaaaaagggcagggatacctgtggattgattaacatatgcactagtcttcacatagttcgttcactggtcagtccacccacctgcctacccatgctccatgcaggcatccactaatccatctattgctttatgcatccatttcccctttaccccatatccattcattccctcatctcatcagtcctcccatcatctacctactcatccatctacccatccatccatatatccattacctaatctcttcattcattccccaaccctcccactcacttaaccattcacagatatcttttcatccatccacccatcccttcattctgtgaccctctcatccatttaccatccgtccacttcatcactcatttgttctctattcacctaccccatctgcccatccatccttccttgcttccatccatccatccatccatccatccatccatattccaatccacgtgttctctttccactcatccatcaattcatccatcccctcatccatttatgcatttgttctcatcttcctcacccatctacccatccatccattccctcatcctcccacccacacttccatccatttgttctctattcgcccattcattccccgtgcagggctggctttactttacagcaaatgttacaatgaagaagtgctcatttttctcgaaactctcctcactctgtcccttccaaagaatcctgatgatgtgggcttagaatctcacccttcctgggggtggggaatggggctagaggcctcaggattctgtacctctcagactcctgagtcctgtacctttagagctgagccggcttcccggttcctcttcaaatccggggcggatcattcaaaacgcaggggagccccctgcgtgcgtgcgctgtggctagccctgagtcatctctgcacgtggtggccccttctctcttaggcttcacaggcaggcagatcgctgcatcacaggtggtaagagggtgggggagggaaggattagggctgaacccgaagaagggttaggaaggcgcagtcacattagaagtgatttcaccgcgggagagtcagggtgccggcaggtggccaggcgctggagactcgggaagccaagatgagcgccctactcaccgcagcagggttgctgttcctggggatgcttcaagccttcccaacggtaagggaatgacagtagccccggacagtgtgcgagagcagtggctagagtaaaggaggacaaggcaacctctcaccttattccccaactcaaactagagtgagggggcacaggaggcaactaaaatatgcaagcatccacaggtgggtggataactgaagagtaaagttagagcttctctcgtcacaaacgcaggtagtcgatagttgggagcagtttgctccttcattatccgtgagttgaacccggagcaagagaaagctgttcctttcctgttctgttactgctgccccagagggggtcctggatagagaaacttgagtatgcccttgttttgccagaggatgataacgggttgtttgtgcatccgtaggctggaagggctgaggaaagagaggagggggtgaatgagagcaaaggtgggggtctggccagctggtgatgtgggctgggtgccctggagcaagcacatggtggatatttgtcccaggagcaagtcagtgctgtctctggttctatagttgaaagccccagaaataagtctggtcaatgagttaggaaaactgaacaattcctaggggccaatgccacactaggcattagtgtgtgggaaggagacaggactttgaagagccactcagataatcttctttacggaacctaaggtctacatggaagaaaaaagtgcatggctgaatggtagctgggggagggagacaagggacagcagcaggcttgctggacatgaggtgtctctgctagagaggtgtgaagacaagggaggagagagggcaggagagagatggtaggaaggtgtccctttcatctccagtgggcagtgtgacacctgccctgcagagggcagaagtgagcagaggagccgtcctaccctacctcacccccatgcccgaagccctcattcggggaaggtaagagtttggagcaacaaggaccctggaagatgaaggaaaaagtaggatgtgaaagtggggaggtttggtttcttttctcctactaagtcgaaacattttttgatcagggcatggcacattcttacatgagtatgtaggtttaaggacaactctgggagttggttctctcctttgaccctgtgggttccaggaatagaactcaggtcatcaggtttggcagctagtgcctttacccacagaaccatctcacaggcctgtgaaaacatgttttacaattaaagccgtgtacttactactacctggaatgtgtgaaaatgcccccaaacaaaaaagtataaatgctatgatagagctaattgttttataccaatatcttctaagctgtaagcatgttcttgttttactgctatttacagcatctataaaagcatatctgtatttggatcacttttatagaaatatataggggtttctctttttatttatttatttcaattaattaattatttttcgagacaggatttctctgcgtagccctggttgtcctgagattcactcggtagagcaggatggccttgaaatcacagaggtcagcctgcttctgtctcctgagtgctgagattaaaggcatgtactaccaactgcttttttttttttttttttttttttttggacaaggtctcatgtagctcaggttggcccccagtttgctatgtagccaaggatggccttgaactggtccttctccttccacttcctgattgcttaggttgcaggtatgcactaccatatgccatgtatgcagtgtatgagattgagcttggggctttgggtgtgctaggcaagcactctaccaactggtccacatgctcagtttgtctgtgtttttgttttgagatagggtctgtgtaactcagattggtcttgaactcaccctgtaatcaaggatgtctgcaaacacctaatcttcccactggtgagtgctcagtatattacaggcatgtgccatcacacccaattttgtaatgttttgatttagcttttacagtgtctacagtaggtcttcacatccctggtgaatgagcactgagattcccaccagtgtcttctggtttgtttttataagctggagtctcactatgtagtcccagttagcctggaactcgttgtgtagaccagtctggtcttgaactgatacatctgccagcttctgcctcccaaatgctgagagtaaaggcatgcgccaccacgtggccccaacattgtcttctgtgtgtttgctgcctggggaggaagagtggttctttcctagagaagaggtaagagaatactggtggctgacagagcagatgtgcactgaaatgaaatggcatgccttccagtgtgcaagacaatgtcttttcacacaacagtgtaagacagtagcagcttcccacatcctaaccgacgctcgatcttatcaatctctattttgtggtcttgaacggactgtatccttcttatgttaatttgcatttcccagtgactgtaggctaagcatcaaacctcaagtctgtgggcctttcatgacagaacttggggtgtctgtggggaaagagctgcctgcccagcaggggtctctattcaggtccttcaagatttcttccacctttccattccagttaaggtttgaaatcttactaaaagcagaacaggataaaataatgacagcaacaaacctttttacagctggatgcatgactttaattccagcactcagcaggcagagggtggtagatctctgtgggttcagggccaatttggtctgcattacccaacactatagagagagaccctgtctccaaaacaaaaacaaagattagccaagcaaacagacacatactctgcacaatatatatatatatatatatatatattgctggttactacataactggaatcccagcacttggaaggccaaggcaacgatggtcagaagtctagagataggaccagcaagatggctcagcaggcaaaggcactctgactcttgccaccaagtctgacgtcctaagtttcatccccaagactcacatatggaaaaaaagaactaactcttggattgttctctgatctcctcaagtaggaggtagctcatgcatgagaatgcacacatatgtgcacatgtacacaaaagacatagaatatcatttttcaaaaaagttccaaggtagtctgagctatattgaaagtatatacacacacacacacacacacacacacacacacacacacacatatattttggtttgggatctcaaattctttttttcaattttttctgctttttttttctcagtttttgtcactttgtgacaagcatgttttctgaaaaagagacaggccttgtatttgtaaaattatctgggactcaggtggtacaagtccagagagacagagtttcctctgttccattcttttcttccagactccctgggatggtataaggccatgccttctggtgaattctgtggcttcagaattcccctgatatcttccccgggcatcctgcctttggctccagtctgattttcctccttcagctctggcttaacattttaaggttcctataggggaattctcatgaatgagtctttgcagcatgcagctctgctaataggctgtcactgatgaagcatgcccagtcatcttgcacagtagggctaactgtggcggtcttggtattcaacagagggcaagagaactttcttggattcctgtagaaaagtaactttcagaaccattcaaatcctgactagaggcagaattccatgggatatcccagaaacagaggaggaaaccaaaatgggaagagaggggaaaaggagactatagcttctcttaattgaaggctgccttcctcgattgaggttcacaagcaacaagggttccaaggccaaggcagggcagctgcattactcagctcgagagcagttctgttgagactaggacagcccttactggaactttcagtggtatctactcatatctgaccaaaatacttcttgagtaggagtgattcatttctaggtctgcacatactggcatccgatgcatctcaggacagaagaaaagtgttggggggggggggaccctgaggctggaggtcattgcacaggcagcttaagcccaggttggacctgtgtggtttctgttgagctgtgttctgacttgggggtggcttatctgtagttatccaagtagaagtgcccagctagacctgcagatcagacgacatttcagagaacataccagctctgtctaagggaaggatctgtcttagagaaattagcagaagagcctggctcaagaaatggtgacaaaaagaaggtggcatatatggccagcccagaatgggcaagggaggggcactgcaaggaggaggcatgcgaggagcccagttgtatagactgcagtgggttaagaccctgctctcactgggcaacctaatcagatgtcacatctgccttaataagaggagctatcaaggaagaggcaagcagcgatggggttgtggggaattttgttaggctcctggctgaatggtgggaaaagcctgagaagacacagcaagtgtttgggaggagcatacaagttctattttacccaagttcaggtctcagatggcgtattcaagtatgcatgcttcaagagagttcagcctgcagaactcgtgctgcattccagacccgcgtcgaggggcatcaactcttttcacataagctgcctacaatagcctagggctccacatatcttgatacctttcatcctattgatattttccagtccaggagtaagatctttctttctatttctcttttacacagatttttatttatttctatttcatgtgcattggcattttgcctgcacagacatctgtgtgagggtgtcaaaatccctagaactggagtttcaaacagttatgagctgtcatgtgggtgctaagaatcaaacttaggacctctggaagagcagccggtgctcttaactgctgagccaactctccagcctgagtagaatcttttgttcagcctggtgatgttttattagatccttctcactgctgtaatgaactttaacaaatttggtggccaagagtgtattgtttggtggctctaaggagtggagcgagctgaaaggaggtcacagaactgtgcttctgttacgctccagggactccttgttcttcctagttgcctcttccatcctcaacttcctcagagctctggcccacctggttgcatggtctaaagactgtggttgcattgggaatcatagaagcaagccaaacttaccaggttccacaagaattacattgatctcttcgaatacctgaaaacttcctaccaggttcctcctccctaagattagtctggccttgaacttcaaatcctcctccttccacctcctgagttctaggatcacaggcatgcgtcactattccagatatctctttattgttacagttgtttatttgtgcacatgtctgtgtgaatatgcatgccaggatgtgcatgtagaggtcggaagacaacttgcaggaattggttctctccctccttccaccgtatgagtcctgggggctcaaagtcttcaagcttagaggctttaactactgaggatttcactagtgcagagatcatatgaaccctgcaatgggaaatccttcaagtgtcagctctgtctaatgtcacaagcccttccagcgaagagcttagagagtatgtggaagaaaggatgtgtgtgaggatttggccctccattgctggcattgcaaatggaagacgtggcctagtggtatgttcttgttattgtaactaaacacacaaggccaagtgcttcaaagaggtttcatttggggctgacaagatgattcagtgggtgaaagtgtttatcacacaggcctgatgccctggagtttgagcccctgaactcatgtaagaacaccaatgtagaagcagcatacaactataattccagatgagaagggaggtggggataggtgactacgtagcagaaacaatgaaagactctgctctaagatggaaggtgaaagcaaggaactgatacctggatattgtcttctgacctccacaagtgtgcactgtggcatgtgtgtgacacacagacatacatatacacacagagagcaagtgcgctcgcacgtgcgagcacacacgcagagcacatagaagcaccatcatcatcatcaacaacaacaacaacagtattttaaatttttagaaaagaggtttatttgactcctgattgtggggcctggagagtctagacagtgtggtgcccagtgttctgtggcacaggaattctcagacctgtggttttaaagatccctatgataggggatggagcgctgcttcagtggttagcagcacccgttgctctttcagaggaccagcatctaattcccagcacccacatggttgttcataaccactcataactcaaattctaggggatccaatgcccttttctaacctccatgggcaccaagcacccatgtggtgcacatattacatacagtcaaagcactcacacataaaagaaaatgaacatatctaaagaagaagaaaaaagcttttggtggtagcccgatctagtggtacaggcctgtaattccagctagtcaagagactgaggcaggaggatcataacttgcctggaaattttagtgagaccttctaaataaaaacagaggcactaaggcagcgtaggcagagtgcttgtctagtatgcaccagggagttggttcttctcaagtaccagagaacacaaagccaataaaacaaggacctttcagatctggagagatagatctgctgttaaaaggcttgactcagaacccaaaacaaaggcctttctggtgtcagtagtgtgaatgggatgcggggacagggtaagtatgaggtcaccctgagagaacaggaaggtgaggaagaactggtggattcggggaataaaactacagtttaggcagaggcagctacaggtgacttagtccctttatgggactaagaaagctagggccttccccccagcctcctcccctgcccccacacacacacttggggctccctctgtggggctctgagtgacaggctcccattgctaccctgggcatccagaagatagtgcaggctgtgaacttacacagaattttagaaaagagtccccaattattctagtgccatggttctctatgtccagctactcggaaggctggggcctgagaaacattttgtaaccagccttggctacatagcatgacccagtgtcaacaaagcaaagccaaacaaacagcctgcattctaatttaccagttattcaaatattatccattagagtgatctccctcacattcctcagcagcctataattcagacactgaagttggttggttggttggttggttagttggttggttggttggttggctggtttaatggtgctggggattaagcccatggcctcatcctaggcaagcatactaccactgaactatatccccagtcctctactgtctccccaccctccaagttcttttgagataaactcttaccctctttccaccttaccagccaggtacccaggatggacttgaatttgtcttgcctctatctcctgagtgctggaactatatgcactgacttaaaaaaacaaaacaaaaaaaaaaaaaaaaccaaaaaaccttttgagacagggtctcaggtatcctatatacagttgagggagaccttgaccccttaatcttacagcctctgcctcctgagagatagattccaggtatgtgccagcatgatttgttctgagctgacattttcattattatttatatgaggttggtgttttaaactctgttcctcccactctttaattgctgagccatctcttcagtttctgtactgacatttaaaaatgggtaaattgtagaaagtcccttaatttgggctcatgatttgatatggagtatgggggacatgttgtcctctccagtacactggactttttaaagtcctgtggctgagatggggagggggagaaatggagacaaggtacagttcaaatctccaatttacatttggttgctgtgtgagtttaggcaaacagctgtgcctctctggacttcagtttctttatctataaagcaggagttggctgaaagtaggctggctttggagaagtgatgcagggtaccatataccttcacctgccctgggtggaacagcaggaatgtaagcagacagatggttctcagatggttcagggacagggcaatgctgcctcatgctctttagctatcagtgagacgatggggcaggccaggagggaaaacccagggcaaggacataaaattttcccatactctgaaggccccaaggggctgagtcctcacagctccagctagctctgcctcaggtttctgtacacacgcagggaggggcccatcagggaactgcagcttgtgcgcgctgggttgctacctgggagggttctaggagccccctagccccacccctgtgacttaagaaataaaagcttcttcaagggacctgcaaaagagagagagagagagagagagagagagagagagagagagagagagagagagagagagagaaggagggaggggggagggagannnnnnnnnnnnnnnnnnnnnnnnnnnnnnnnnnnnnggagagagagagagagagagagagagagagagagagagagagagagaacgaacagaggcagcctgtgcctcccgactgtgctgtgtgaatgtctcagtgttcttagctgcagcagtcagaaccaggtatcatacatactaggcaagcactctaccactcagctacaacccagcccctaaaccttaggttatatttatcatttcaagttaacaaggtgacatgatttcagaagtgtcaaaaaaaaaaaagtatagttagcacccacacacccaccttccagcaccactaagcttggtgtagctctctgaagtttccacaaataaatacaacaccccaccctacccccatttgcatcccaggctggccttgaattcatgtgtagccaaggcaacaaatacaacaccccaccctacccccatttgcatcccaggctggccttgaattcatatgtagccaaggcaacaaatacaacaccccaccctacccctatttgcatcccaggctggccttgaattcatgtgtagccaaggcaacaaatacaacaccccaccctacccccatttgcatcccaggctggccttgaatccatatgtagccaaggcaagtgtgatggcggatcttggttgtatccttgacacatctaggaagagggaagcttggtggatgaattgtctcccattagtttgacccatggcatatatgggtggggcattttcatgttggctaattgatgcaggaaggctcactttggaggtgccatccctgagcaagagggtcttgtcggtataaagaaagaggcagccaccgtgagcctggggaaaagccagtaagcagtgcctcctccatggtcaatgtgttagtttctaccctgacttttcccaatgatgggcttgtctcctaggtgattctaggtcctgttaagttgaaaatcaatgttaaccgtgacaaagcttgtgagacgctggacgtggggaaatagaaggagtgggagagatgacctgcgtctcgccagaactcgggggcactgggcgggcagacttgggtgattgccgtgggatcccatggaaccgtggctggatgggcgtcaggccgccaaactcccctctggtgggtagggaaaacataatctgggggttctcagtcttggataccccagaacaccgctgaatgtcttggaagagctgagaacgaagtgggggcaccaggggctgctcagtcagctccaaggccaaagggagaaaggggtaggggggcgaggaaaggtgctgggtggtttctgcaggggcaagagtccttgttccggtctggcagctggaaacgctgggaggccttcctacgggcgattagacgtggttctttaggggaaagcctattccattgctccagcatggcgggtcctgatgagcagtgatggtccatgtaaaaactttattgtagaaaagcagagagagagagaagagtaaagaagcagagggcggccgtgcccctgtggagaggggggtgggggagggagagaaggagagtgagaggtgagagtaagagaggcaagagcctcaggtaactgtgggggtggaatctagccagaataccatgagcttgggcattgcttgtgtgactgataacctcaggattatggagttgagggctcatggtgtcaggagcctaatgtctgggagcatagcttacagttctgtcccttgtagaattttctactgggtctccagaacacagactgcctttcacagtccaacaaaagccctcccagtggggcttacagttgaaagaacactagaaagctgcaggactttcttcccaataataagtgaggctggtattagtcatgagagaaatgcaaagaaaccataccacaagctatcactgcaccacaccaccccacccccaccaaagctactgcatctttaaaaagcagcattgatacccaacgcacgttggcaaccatcatgcatcggttagtgccaacaacaatgcaggacagatggcagcctcgaacattgcagctaaatgatcagtgcaagggcttgggggaggggggggagcactggatggagagcaaggctaggagtgtggctcagttggcagagtgcttgcctagcatgcctggagccctggattccagccacagcttaaaactgggtgtagtggcacatgcctagaatcccagcacttgggaggtagaaggaccaggagttcaaggttatgcttggctattagttgagtttgaggccagcctcatctatatgaaagtcttgtctagaaaagaagaggggaggggagagaggaagaaaattagatgatggtctatcagagctggcacttaattcactatagctgtgtttggaaattgctacataggctagcacatgcctttaatcccagaactcaggttccaggggacctgacaccctcacacagatatatatatacaggccaaacacattattttcttttttgtttcgttttgagacagggcctcaaggtatagccctggctgtcctggccttggactcacaaagatcagcctgtctctgccttccaagggctgagagtaaagtgtgtgccacaataacccccaccccaaaaaataaaacagactgagcagtttgacctatgtcaaattcaagagcagacagaattaattaatagacatggcgatgggttcatgttttgtttccagagagggaatctgagtatgctgggcgtgggcaaggtcctgcctgtgtctcgggatctgggcacttttccatctgggtatgcaggatttcagctcatacaaaactttaccaggtgtttttattgctgcagttgtcccagagacatggtgggaggcttgtcagtcccctggaggagaacactggtgggaccagctgctgctatggttgatagcttgaaggtatctgagagaactaactggctgagaggaggggtgcaggggggacctgtgaacagaggagggtatggagactcttgggtgtcccatttgcatctaagctgtcgttgtttctgcggggagatgaggagtcaggaatttctcctgatctctaggacggtaggtctcagccttgacagtgagcggataccaagtggggactgcagggtggaattaagggtggaagtctggccttatttcaccagcttctctgaccctccaggatcgaccactcaagaccacctgtgccggagacctcagccactacccaggggaggctgccaggaactgctgttaccagtgcccctcaggtgagtatgggataccaaaggcaagaggtagattgttttagtatatgatattcatggaggaactggagaaaagcaggagttgaggagggatggatagaaggtaacaaagataatcatgatcatggttagctacaggtttccaaaggccatctctaatgtcacagggtctggggaagggcaaggctgccttctgggaagactaggtctgctgctgccacaaggatgcaagaccttctcaccctcctcctccatcattttatgagtattttgcctggatttatgtattgtatgcatgcaagctcttgcatagattaaaagagggtgtcagatcccctggaactagagttacaggtggttatgagctgccatctgagtgctggggcttgaaactgggttctctttcaagggaagcaatgaacctgctgccctacctcagtatcaatcgagctgggactgcaggactatactacctcaccctgacctttacagttcatgtctgctccaagccagcacatgtgttcgtcccaggctgccctgggctgcaacttctgtgggacagagcttgcctaaccactgctggcttcctggaatgctcccccacccctagtacagtgtgagttctagaagaatttcaggaaatccatctggaacaatcttcaggcctgaagattagaaaaggggttatgagcctttttgatcccctgtgactatgatcaaaagtctcaagcacatgccgggggttcattggtggctggggtaggagatgcagctgtggtgctgtctctgagatccgggaatagacgtctgcttgaaagaaacattagctatgacagttgagggtgggaggaagtctctgtcactggctcagtgtatctggcccctgcttttaggacagcatcagaggtaggtcaccatgtctggagggcttcctgtgggtgagaagtagtaggcccatgtacccaatattaatgcttcccaggcacaatgtctggaggtgggtgcaggtagtactgtacaaggtcatagaggatgtgactatagctaggtgagatgcttggacaactgcttagccctgtgttctctgatggagcagtcttgcacgggttaccagatgatgtatctgagaaagaacttaataacgtctattcccaaaaatgattttaaaatatttctgtggaccttgagagatggctcagtggttaagagcacttcctgttcttccaaagaacccaggttcagttcccaacaacctcattaggcagttcacaactgcctgtgaacttcagctccagggaatctgacacctctgaggacacacatacacacacacacacacacacacacacacacacacacgacatacactcataaacacacatatacataaagaaaactatttgagctgggtggtggtggagcaagcctttaatcccagccagagccaagtggatttctgtgagcttgaagccagcctgatctacagagtgagttccaggacagccagggctacacagagaaaccctgtctcccaaaacaaaataaaacaaaacaaaacaaaacagccaaacaacaagaacaaaattaaatgttcctgtgatgatcctttgatgacagcttgacaggatcccatgtagcctaagctgcctttgaactttgtggcagcgaatgctggccttgaactcctgatcctcttgcttctcgccctctcccagtgctgggattaattacaggcctgtgctaccataccgagcttcttttgggttccttcctgccccctacttgcctcccaatccagctcattctcttccctgttcctctttggggtcctgcagaccattgctttcccctagttagaaactggaggacccaaggacaaggttctgtcctgattaggtttctgtccagagctcttcctggcttacagactgaccgtaccacccttctatggtgtgtactcctttttcatagagacccactcatcccatgggtttagggcttctggtgggctcctttatccatagtgagctcccaaacctctgtctctccaaattaaagttaagggtttcattatgaattgggggtggggagtggggcgtgtgagcaattctagtccacagtggtctcctcccacctccccatcctctcatctagtcctgctcctcatctattccctccacccacccacccacccacccttcaatccaatggcaagatcactcttggaagaggtcatttcttccagctcctcccgtttttttttttttttttcaggcctctggtcctttggtgctgtctgtttcctttacccctgcgtgtccctttctgctatctccatcctattgcagctctgagacactacctctacgagccttcctttgctgcaagggactggcttcctgcatttctgttctggtcggtttttgcccttctgtccacagagaggtgtggccacagtgctatgacgttctgaagccacagttccagtcagagagagaaagacacttgtgagcatgacccccaggtcttaggctttctccacttaacagctgggacttacagacaggggctggtccctcctctcacttcctctaaggctcagtgctgaaagtggctgagcacctcaggtctttgtggtgggcggggcgttttgctggagttttattgaccctgtgcttccggacaagccacagaggaaaaccagaaaaaccccttcttccgtgttttggggaaatttctgacattttgcccgccctctcaaatcagcgctcaactatgtggcagggtttgcacgtgggtggtctggtagaggaagctggaagacctttgaatttgagaggctgagaggtcttctcctgtctgtcctcacctaggaggggtgccttgccacctgctgacagtcacttcccagttctctgctgacatacctgtggtgacaactcactgcctgcatcataaaatgaccaacagcacttatgattcaggccactacaaaggaggcctggctctttccccacagtagcacataaacctcataggaagccagagaaggaacttgaacacggtccacaatcacctgagctcaaccctgagctccttcagccttccttggtgttctggaccccaggccttgttcagggttgggatggtgaaggccctggtgtctctccagcttctattcatgagtcagaagaacataggttcaccaaatatgatccaggccctgcaacaggagactcaatgattgctgtaaacagagatagccatcctgaagagtgtgggagtatttcaggtagataaatttagatactgaaatttaactccccagtcgtgacgaaaggaatatgccaccaagccagatttcatcaattttaaccagaaattcagtagaaaaagccagaccatccatcttgaaaaacgctcaagggatggggcttatcggttggtggtctgatggtcatgtgcccatgttgagccaatcacaatggtgagaaagataacacgttctgattggtctgttggagtcacatgcctattctgaggcgatgatggagaaaaatgaaatgttctgattagcccacctcggtcatgtgcttaacctgtggtgaagcagtgggaaacatacgtgactgaacaaacatgacaggctctggcagaacagatagaacctggcagatatcatgtaccctttgcctccgtcatcatcctgcatctcctgtcctctaagtttgggaggaagattgctgggtggttccagggcctctcagtcagcttgaatcagtatcttcatggccttaactccccatagtccccccagttccctcagagaatcaggacctctgctgagagtgacagccagcactcagactatacttgctgaacttcaccgacgcttcacccttgtccactctaggagaaacagatcatattgtcactatgagtgaggtcgctgcaattgtccatggtcacggattgtcagttggcaggccaggaatgccagatcttccccattcttgggctgcctatttgttcccagtgacctccatcgaggtccatgcctccgtctgtaacacaagcattatctgatgcaaccgcttaaagcagagatgaatgggatttaggtatgagaaatggagggtggaaggccagcctgttaccaagacaacctagcctagaacttccctgctgctttccccagggttgtctccgacacagccatgcccacggggtcctgcccactgcaggaagcagtgtgcacctgactactacgtcaatgaagacgggaagtgcacagcctgcgtgacctgtttgccaggtgagaacctattctctctccctggaacgtgtctctccaggggtgggggatgcgcagaatctgagaggcaggaagtatcaagatctgatctcctggtgcttctatttacctatctggatttgaagattgatatcagcagccatcttttgcatccatacttttcagaaagatgcagtgtgctccctggagggagaacgggcatcatcacaatgcccccatgaaggacccttttctcaacccatttctatagtgaagaatctgaggattcataatgtgaagggccttcctggagcagtccgagcagtgccctggcatcaagagctgcattctttctaacaaagaaggtgatgcttccaggagagttcttgaaataggttcttctaatattaattgcttgtgcttagtgatagtgtctggcattttcttttggttttgtgtggatggttaggttgaaagacatgttgagattgttctcaaaacctaataatcatattttatcaaagctttcagtgccttttttataatgtgtattttgtttattgcatgcaaagatttttctaaagattgtattttcttcctaattgtgagtgtgtgtgtgtgcgcgcatgcgtccttctgtctccatgtcctgggtactgggatcacaggtgtgcactgcaatgcctagtttatgcaatgctgaggatagtactcaggactttgatcatgcaaggcaagcaatactcttagctactgagccatctctccaaaccccacccccatctttttaagcatgggttctggagatgaagctcaagtcctatgctttcacagaaagtggtttatcccacagccatctccctcagaggagaccatttagtagtcagactccaatacagaagatgagctagtgtggctatgtattgctgagttcctgcctcatcgtgattcagctgggatgcccatcatatgggatttgaccatagacggtgtatctgtgcccagaacatacagtgcacttcctaaaactcctcatgcttctatagtttatctttccatcctcctcaccgtggcaaccactgatggctctcctgcctgtacagttaaaacatcagtcttgctggaggtccatgaaaatcacagtgtaatgccttttcagaatggcctgtcacacagttacgtgtacttcagttctttccatatcctgggacatcatatatatgcatggagtgtgtgtgtctgtgtgtctgtgtttgtgtgtgtcagtgtcggctgatgtcaggagtcttcctcagtcattctccaacttcctatttgagacggagactctctcagaacctggagctcactgattcagctacattggctggctagccagccctaggagtcttcccatttctgtagcagtcatatagggtcctctcagttcagttttttacatgggccctagagatataaactcaggactttctgctctaagaacaactgcttttacccactaagccgtctccctagccccacatttatttgtttgtaatctatgtagtagtagcagacatatgggctggaagtgaaggttaccctcacgctgcccctttcatgcacatcaggagaactgaggagaggcacagagtgacagccaactggtctgacagagggtcatgtggcatcttaccttcatcctggattgtccctgtgtacactggacccccacccttggctcccctctttcccttccatgaccctctctgtgtccctcaggccttgtggagaaggctccgtgttccgggaactctcctcgaatctgtgagtgtcagcctggcatgcactgctgcacaccagcagtcaattcctgcgcccgctgcaaactccactgttctggagaggaggttgtcaagtctccaggtgagtgtcccacagctcccacagctcccacagctccttagtagctactgttgtgcccgccacaggcctcctaaccttcccaccactgtaggataaacaggtcgaagcttctctccccatgctgtgatgtgtgcagcatccatccggggtttctgctgttcactgctcacatctgcgtcctgtcagaggtactctactggcagaggcccacgcctggttaaaggaggctgtgggcccatttgaagcttggggtcagggacgattctccggtggtccacaagtaagtaggaagcctcaagtctctaccctgggagttatctgacaaattagagctaccttccctgcgtcagaataggacattttattggagagaggagtactgagacattaggcaacagattaaaggcagagaaattactttgctttgtttttttcccccagtttgcctcgtgacatcaggccttaccatctcccgtttctaattttttgacaatacaagggaggaggagttcatggtcagaggaagagataagaatcatggaacttcactggttgccattagaagtggtgttttggaggctaggctgattccatagtgagactctgttctcaaaaaaggaggtggtggtgtgctttctagaagggggacatggaggtgggggtgcaaaaaggacagtacaatcacataaactcctggtggggcaaacagatggtgaggggtgaaaattgcaaacccttttctctaaccggtgtccttggcttttctggctcctagcttcatgggctttttccaagttcctgaatcacagaatgctctctgtactgtgggaccctgtctgcaatcagcagcgtagctgagggctgggctatattgaagattttcacctgtggatagggccagttcctctaactctttctccttgctcatatgatgaggagatgttacttaaaggcttccgtgtttgtctgtcagacagattctcaaccttccagctagcatggctaggctgtctgggcagagttcccaagactgccacatgggggcaacagaggcctgtctctgaagtcctgccattgccatgtgtaaaaaaaaaaaaatgcttaaaatgtggcaggtctaagttaatatgttctgtctataatgctcagtaagtttcaaagacctaccatgtaagcgagaatacaatgtatctttttatatttatattggttaccaactgacatagatcattatgttgttagattatttctttctgagacccactctcattttgtagcccaggatgtcttgtaagtcactatgcggcaagactggcttcaaaaccacagtaatccccctgtctcatcctcccaagtgtgggtattaaatgtgtgagctgtgtgtgcatgtgtgtatgcatgcatggacatacgagtgtgtgtgtgtgtgtgtgtgtgtgtgactgaactcaaggccattcatgtcatacaaggactataccaataagcaatactcctagcacaaagacatcattaaaattatttatttctttatttatcttttgagacagagtcattctgttgcccaggttggatttgaacttctgatcttgcttcctcagactcctgactgctgggattacaggcatgtgccactacacccagattcatttttatttttcgatttatttattttatgtatatgggtgttttacctgcacgtatgtctgtgtaccacatgcatgcctagtgcccacagaggcaagaagaggttatcggatttcttagaattggaattatagaaggttgtgagctggggattgaatcccatcctctgaaaaagtatccagtgatcttaactactaagaccacatccctccttttattgagacagggtctcattatgtagctgttggctgacctggaactcactaagtagaccaggctgacctgaaactcacagaactgttcacttctcaagtcctgggcttaaaggtgtgcggtactggcatagtgacacagcacattctgtcagtggccctgccacagtcacctgaccttgttcatctctggagcccctgtggactctcccagaaggcagctctgggagatgtaggatttccggttgtgaaaggggagagtaacttctgtttcagcatagctcacagatagccaaacactcaaggctattatggactttcttcgcaagcatcgcgtgtgtgcagagcagattccatcagctcctttctgtaggtagggagtttgacacccagagatggcagatgagcagcccaagaacgtagagccaggattgggtgctcagctgagctgcgtcaacttcatcgcactgctgaccttgctgtgttcacctccactgaagtagttggggcatcttccaactcatgtgggtcactccctccctcggagatgagattggcgttggggtgtgagaaagtacagtacaggcagtaaggttgagcgcttactgtttattacctagtatgacagacttgttttcatgtggttgtttatataaacagcagcctaatgaagactgttatgatctacttgactgcctggcttagtaagaatgtggtagagatggagggcannnnnnnnnnnnnnnnnnnnnctgtttgtgtctgtgtgtgtgtgtgtgtgtatatgtgtatgtgtgtctgtgtgtgtgtgtgtgtgtgcacctgtgtgtgtcagtgtgtatttatttgtgcacgtttgtgcttgtgtctgtgtgtgaatgtgttgtgtgtgtctgtgtgtgtctgtgtgtgtgtctgtgtgtgtctgtgtgtgtgtgcctgtgtgtgtcagtgtgtatttatttgtgtatgtttgtgcttgtgtctgtgtgtgtgtctgtgtgtgtgtctctgtctgtgtgtgtctgtgtctgtgtgtgtgtcagtgtgtatttatttgtgtatgtttgtgcttgtgtctgtgtgtatctctctatgtgtctctatgtgtatgtgtctctgtgtatgtttatgtgtgtgtgtatctgtgtctatgtgtgcctgtgtgtctttctgtgtgtatatgtctcttgtgtgtgtgtctgtgtatgtatttgagtatgtctttgcgtgtatctctatatgtatctgtgtgtgtctctttgtgtgtgtgtgtgtatctgtgtctatttgtgcctgtcttgtgtgtctgtgtgtgtctctctctgtgggtgtgtctgtgtgtttactgtgtgtgtgtctatgtgtatgcatctctgtgtgtgttactgtgtatgtctctctctgtgtctctgtatatatgtatctctatatatgtatctctggggggcacaaatataattatgtgtctgtctgtctctgtctgtgtgtctgtctgtctgtctgtctgtctgtctgtctgtgtttctgtagctgagtgtgaacatctgtgagcgtcactgaccaagccaagtgaagggatagatcctcctcactccagagtgaacagatactgggaaagccagaatctctgtctcggggtagccattgtgtcctcctagtaccttgtccatgattctacatgtggtggtgacacttctgctcctggggactctgagtttctcagtgcctgttctgaagacattgctgtctcttttataggcacagcaaagaaggacactatctgtgagctgccttcctcgggatctggtcccaattgctccaatccgggtgaccgcaagacacttactaggtgactcctgtcctcctttctgttcctctccaggtgatcttggatggggctactctgtcccatgacacacagggtgcacaggcaggatcagcccaggctcgcaggaccctagggtggctctctgacaagctcaccagttatatgagtccctgctgtgtgtgtctagctctgcctgatgcccataagagacccaggtctaagaaacttggctcttgctctcagatcatagcagggcacataggggctgagacaggagcctttctccatagacactaatccccaaacccagacctcctggtttgtgaagacatcagacctttgtctggcttcttctacagccatgccactcctcgggccatgcctactctagaatccccagccaatgacagtgcaaagagcttgctgccaatgcgggtcaccaaccttgtgnnnnnnnnnnnnnnnnnnnnnnnnnnnnnnnnnnnnnnnnnnnnnnnnnnnnnnnnnnnnnnnnnnnnnnnnnnnnnnnnnnnnnnnnnnnnnnnnnnnnnnnnnnnnnnnnnnnnnnnnnnnnnnnnnnnnnnnnnnnnnnnnnnnnnnnnnnnnnnnnnnnnnnnnnnnnnnnnnnnnnnnnnnnnnnnnnnnnnnnnnnnnnnnnnnnnnnnnnnnnnnnnnnnnnnnnnnnnnnnnnnnnnnnnnnnnnnnnnnnnnnnnnnnnnnnnnnnnnnnnnnnnnnnnnnnnnnnnnnnnnnnnnnnnnnnnnnnnnnnnnnnnnnnnnnnnnnnnnnnnnnnnnnnnnnnnnnnnnnnnnnnnnnnnnnnnnnnnnnnnnnnnnnnnnnnnnnnnnnnnnnnnnnnnnnnnnnnnnnnnnnnnnnnnnnnnnnnnnnnnnnnnnnnnnnnnnnnnnnnntcctttttagttctcagttggggagatttttgtctatagctgcttggttctgaggcagctcatctccacaggcgttgctcacctcatggtggccaggatgcacaaagaggcaaaggagaggtagggactttttcacggacgtactcctgatgacctttctcccttcctctgggctccaggttctgaagctccactgcctctcagtagcatgatggatgtctgggatacagtagcatgatgggtggctgggatacagtggcatgatgggtggctgggatacagtagcatgatagatagctgggatacagtggcatgatggatggctgggatacagtagcatgatgggtggctgggatacagtggcatgatggatggctgggatacagtggcatgatgggtggctgggatacagtagcatgatggatggctgggatacagtggcatgatgggtggctgggatacagtaacatgatagatagctgggatacagtagcatgatgggtggctgggatacagtagcatgatgggtggctgggatacagtggcatgatgggtggctgggatacagtagcatgatagatagctgggatacagtagcatgatgggtggctgggatacagtagcatgatgggtggctgggatacagtggcatgatgggtggctgggatacagtagcatgatagatagctgggatacagtagcatgatgggtggctgggatacagtagcatgatgggtggctgggatacagtggcatgatgggtggctgggatacagtagcatgatgggtggctgggatacagtagcatgatgggtggctgggatatttaccagagttccttttctctctttgatatgtgtacatacttgtgtgcaggcatgcttgcgcgcatacatgacacatgtaccatggggtcagacgacgacctgtgggtattgattagttggttctcttcttccacaatgtgggtcccaggatccaactaaggtcatcaccttagtcacctaaggtctttcctgctgagccatcttgctgccctttaagcttcttctaaataaaaagcagaagctgcttttggaaccctgccgcagaccctcttgggtcccttgtctgtgtagaatgggtttctagttgcagatgggcaaggagtcagagaatgacagacagacgcaacgcaagaggttgtgtagaatctgaatgtaatttttcaaattgagcatcaaactatttatacagaagaaaatagggaagttaggtgacacatcggcaaggtacaaatgaggttaccggatgcttaatgactcttacacaaaacagaggaatgtaaacaaaaggactggcaggaactgggcaataaaacaactgagacaaagtcagctctatctaaagtcaactctatctaaggtcatagtcttagaagccaggtgtgaggtctttacactcctagggcaagggctttcacacccaagttatggttctaattagggagttccgctctagctaaccttctcatgaataatgcaatactctaaaacaacagcctgatctacttcctaaaccattgtaaattcctgtatatgggagcgacttggattttatcctaagtgatagtgtgaggggactttctactaataagtaatgtagtctgccatatataactataataagaattctaaacttacattgctaagcttgccctgagatttctaactctatgtagtagatagtaaagcctgatttctttcactatctctcttacaatactagaggcaattctgaatgtcactgaataggcaacattcttactgaattcctactgaattccaagtttgtcatcttcaagaattttctgggacgttggaacactggcgaaggcttagctatgtcagaattcaatcttaaaaggcacttataataaaataatactaaaagagagcacgtggatccatacaccagactaacacggggatagggtatcagtatacgggttatgagagtaaccgttgccagagttccaggaggtgagtttccgtgaaactctttgcctcgtgagtgcttccaggcctctcagcctgccaagcagacttcactggagcgtgcatagcagaacccatggtaccatagcctctccagtttgatgctttaaagcacaaccctcatggcctttgtcacttgtagccaggaattgtgtgttatggaagactcccactcactactttccactacctcccaactgcctcccactgttccccactgcagactggatattcaaactctctgcactgattctaatatgtcatcatacctataggtaatgcagagaagaatatgaccttggagcttccatctccagggacactccctgacatcagcacctcagaaaacagcaaggagcctgcaaggtgactcctagtccccccaccccatgggaagggcagaatggccctttgtatgctcaggcagtgtccaggaaagtaagggctagacatgcaggggcatcagaccttgaggcctttggggaggttggggaggaacatggctgtgtgtctgtctcagtgattacaggattgtaaagccagagggtctagagcttaatcaatacctcacaatgcctgtaaagactgtgttgatcttttgggtacccaggcttcatctttaccctctgtagagaagaaacatccttcattagacacaccctttttacatggcaactgtgaccatcacccttgtccttggtttcctttggtatagtaccgcctccaccctaagccttgtggtagatgcctggaccagcagcaggatgcagcccacctctccattgtccacgggaacaccatttctggatccaggtaatgatcattcactgtccaaagcaaggggcagcaggacttcctttcagggctttggcctcgggtggattgagaaataaagaccaagcccaactttctggcttctagaactgaccctgtggctctgccgtttcctaatattatctcattcttgggacagaacttttcttttttcatgacttcattctgatgacctataattgctacccaaaattcagttttgaggctgggggtgtggctctgttggctgaattttcacctagaatacccagcacctctgggtctgatccctaccagggtatccacggggcttcgtagtgtatgtctataatctcacggctgagaggtagatataggaaaagttcagggttggatcaatgaagtggctcatttgccatctgccctgcccaaggaagcaagcccaatgaactcagtttgatcctgagaaaccatgtagaggcggaaggacaaaacaaaaggctctaggcatggcagatgcttggtctacatgtcaggttcaaggtcagtcagggctacatagtgagaccctgtctcatggttgttaaaggtcacattctgctatataacaagttgaaggccaccctgggctatatgagaccctatttgaaaagaactctcacttggggtagtggtacatgcctttaattctagaatttgggaggcagaagcaggtggatctctgtgagttcagggctagcctagcctacagagtgaactctaggacagccaggactacacagagaaactctgtcttgaaaatccaaaaaggggggaaaaatagaaaggagaaagaaattgaataagttactaaaagtctaggaagcttaattcccttcatcctcagtttccttggatataaaatggatagcaaatcagcccccaggattatcagcctatagcacaagtatggtcttcacattaccagagcaggatcaagacagttgctgctcctgctaatgaggtaacaccaggcagttttaggactagcagtactagttttggacacacggtggcaatagttctcaagttaacagttctcagcatgccatagaaaactctttgagggctgtggctatggcttagttggcaaagtgcttgcctagcacaccaaagagccttggttccattcccaggcccacataaaccggtgtggtaatacatgcctataatctgagcacagaggaggtggaggtaggtaatcctgagaacacagtcatcattggctacacagcaagtttgaagctaccctgaattactgtcccaataataacaaacaaaacaaacatacttgagcaataacacccaaggcatgtacccacataacaattaaacaattaaaataatcagtgtaggctgtgtaagggtgggtcgagtaaatgcacgggctaggcaaggtttagtatacattgaagtttagtatacatgaagtttagtatgcattaggtttagtatgcattaggttctgtgtttgattcatgttacgctgtgtgcatgtgccagtgtgtgtgcaaagaatatgaaagctgaagttacctggcctgagtggtgactctaggggtgactttggacaagatttagtcttcctcctttggctctaaaatatattcattcattcctatgtatatgatgttagtgccccaatgccatggttcgtgtctgaaagttagagggcagtttctgcgggcttctttccttccacttttctgtgggttctggacattgaactcaggtcatcaggcttgcagtaagtactttacccactaaccatcccactggccctttttgttttaatggctgaaaatgctttgtgcagagctgaccttgtgtctgccctcgggagctgatggtctcagtttccctaaccagccttcactctccccatctcaactagctacagcactccaacttctagagttttgttttgttgttgtccttttgtctgttgttgttgttgttttatatgaagtctcactatgtagccctgactagcctggatctaggtatgtagatcaggctaactggtttacctccatctccctagtgatgagattacagtcatgtaacactatacccaacccattctaattcttttattttttcttcttcaaatatgagtacactgtagctgtctttagacacacaccagaggtgtgcatcagatcttattacagatggttgtgagccaccgtatggttgctgagaattgaaccactgagccatgccatctctccagccaccactccccccccccccccgccccattctgattcttgatgtctcgatttctcatcctctctggtttctttttcttactttctgagctgccatatagcttcctggagccaggttggggtggcaaggtaagggctgaatcagatggtcccagattcgggaaggttcagggctgctcatctcagtgggacccatgtcccaggaaaagtaggaagtgggctgcacctaggactgtcctgtgtagtccagggaagggccctggctcctagctgtgcacagagtacaggatggatgacactgtgtttcagggcccgtgctcttctgggtggccatggtggtgctactggttggctccggctcctttctcctgtgttactggaaggcctgtaggaggcggttccagcagagtaagtgcatgtgtcttggggtcctggggaaggtggctgcattaatctggcctggcctgggtactgctctgtctttccttttcctacctgctcacaccctaagccccaagcctgctgtttttgcagagtttcacctggactacctagtgcagaccttccagcccaagatggagcagacaggtgagtattgggacatgcgaagggctgtctgggccagaatggataggtacatgaccagtgtagggcctggggcctagaccaactcatacaaaaacaaaaacccaaaaaaaaaaaaaaaaaaaaaaaaagccattgtccagcaaggggtgttttgagttggagaagtttcataagtacatgctcgtacctcctaagcgctccccaagcaaggggttttttgtgttttgatggtttcaagcttgtttccatgagctgttgggcagggtttattgaaaccgctgtttgctttcttgacatttttctagtattagagtttccattgccgtcagttaattttttttttgtttctctccaaatgttcatgagaacagtcttgttagaatgagagaaacagagagagaaagagacagagacagagagagacagagagagagtgtatccaaagagtctatctaggccttaagactggcctcagtattgtgtctgaggctagttttggacctctagattcccctgggtcccttgatgtttttttgtttccagggttgagtgagaggaagtgctcacctgggtgagcacacagggtccagataactatattctaggcaaggatagtcatgacctgggcagcgtgggcctgagcaaggtagacatgacctgagcagggtaggtgtgacctgggcagagttggcataacttggatagagtgggtatagtctgggcagggtgggtatggcctgggcagaattatcttgaacagggtaggcatggcctgggcagaattatcttgaacagggtaggcatggcctgggcagggttggcatagcctgagtagagtggatatgatctgaataaagtagttatggcctgggcagtgtgagtatggcctgggcagtgtgggtatggcctgggcagagtgagtatggcctgggcagggtgagtatggcctgggcagggtgagtatggcctgggcagggtgagtatggcctgggcagaatggtcttgagaagggaagggtagacatggcctaggcagcgtgggcctgagcagtgtggggacagcctgggcagtgggtgataaaggagcatttattcatttccttgctgtcttcatgaacacatcttcagcacaggctttgtctaggcacaggcagtcctagatctttcaaacttccagacaagtgtgacagctggtaagagcagacaggcacatgtgttccggccccactaactcctctgaagtgaagactcttattcccctacttgcctgtgagcaaggacctatggactgtgcaggttaatgagatgtctgccatccatcacctgaattgacctgacattaccgcaagtgtccttggtacctttaccaagcacggggaacatctcattttatcctagggtggccttttcagcccctatcactctctttgtttctcagatgactgtgtgaggcacaggaagatgaggtcagctggcaaaggccacgtgctgagcagacagtgagatgaggacttgtcgttactgtcactggagtttccatgaacagtgtgcctcatccttagcaccactgagatttgtcagcttgagccgggcactgtaagatgtttagcaacctgcctaatgccagggtgcacccctcctcagctgtgacagagcccagaatgtccccaggcattcagcccatcattttattctatatttagctaattaactttcagacaggctggcctcaaacttgctacactgctgaaaatgaccatgaacttcctatcctcctgtcttcagcttttgtgctgagattacaaaaaggtgttgtagtggcatgcctagtttctgcttggctgaggattgagcctgtcagttcatatatgttggcttcatacatgctggacaagcactcttcaacaagctgcatccccagccttcagtccttcccctcagcccttcattttaacatacacatgaaattcttgactggtttataaaattatttttaatgatacgtatgtgggggcaggtattggtgtgtgggtgtgtaaatgtgggtgtgtgaatgggaatgggagtcacaggtgggattaaaggtgtgcaccacccgtgcctggataaggattgcagcccctacctcgctgttatcacagatgatggaggctgaaaaggattgctttgctctgatactgtttcagatttccaaacgtagggaacagtacaaaaactgacattttccaaaacagtttttggagtaacttaacagacttgatttcttatcatccttaagtacttcactgtgtgtttcataataaccaggacattgcagtaagaccatcaggatcaaagaattcagcctgttctatcaccaccaatcagtgcccagatcagactggtttgtttcttttctcttctcttcatttctcttcatttctcttcatttctcttcatttctcttcatttctcttctcttctcttctcttctcttctcttctcttctcttcctcttcctcttcctcttcctcttctctttccttcccctttctccctccctccctcccttccttcttttcttcnnnnnnnnnnnnnnnnnnnncctccctccctccctccctccctccctcccttccttccttccttcttttttggtttttttgagacaggatttttccatgtagtcctggctgtcctaaaattcactctgtagaccagaccaccctcaaacacacagacccacctgcctctgtctccttagtgctggaactagaagtgccgtcatacctggtcagaatgggtttttttgatgtgtcccaataacatttttggcttggatcccatgcttccattggtcaccagatctgtggttctcctctcatcttggtcagttcccaattattccttgggtatcaaagccttcacactagggagagtcatgagctgatctggcctgtagtcctgatcttgggtcttgacctctagtacaaactacaagaatggacttgggccatcagtctttgatgctgagatctttggggagcttcctgccacacttccatctgtcattttcctggcactgtgtatttggagcactcttgcaaacccatcagccaagccacaccttgataatgccttggtaatgactggtaaaggagggtttagagatttgtcaataacctgctctgcttttaatcaaggtttgttttcttgttagtgtatgtatatctgtgtgcattcataggtttctttcattattttaatgttgccatcattgtagcaaattcttaaccactgtcccagagctgggtagcaggaatccctccagacatgtccttttgtgttgcgggtaccattttggttttgtttttcattttttgagacagggtctcatgtagcccagatgtcctcaaatatgtcctgtagctgagactagccttgaacttcttgttgtatatgtgtgtcagggggaggattgttgttgttttgttttgtagggtttttatgtttgtttgtttgttgtttgttttttgagagatgttctcactatgtaaccctggccagcacgaatacacagagatccacctgcctttgcttctcgtgcacttggtactccaacatgctattttgaggtgctggggattgtccttttttttcgggagcccttccaggtcatctctccacctagggagtctatttactgagtctactggtcccaattgcaaacttctacgtcagagctgtcctgcctcccacagctctgccatgggactgagagttcagagtaggaacagagctttaaatctctggcactcatgaatctccaagcgtggcctttggagcggatcagtgatcagccagctgagcccggggccactgctgtacagtctgtcctggacttgggccctggggttcggaatagatgtacaagtagattgtgattattccaaaaagcaaggaaaccaacaaatgaggacaagcaggctaacgcaatcgttattttttaagggaagagccttgggcaatctgaactctgcccttggcaagttctactttgggtctttctcagagaattcacaggctgtaacagggcaggctgttggcagaggatgaggccctctagattctgccctctattttttttaatgtaactctttttttttttttttttttttttggcttttcgagacagggtttgtctgtgtagccctcgatgtcctggaacttgatttttagaccaaactgaccttgaactcaaagattagcctgcctatgcctccctctgtagtgctgggatcaaaggtgtcaaaggtcgccactgcccagctttagattctgcttttttttttcaccttgatgtaaatacatgcttgtttctgaaagttagaatctatacatttttttctcctgtcatagaaaatctaaactgtgttagcaaacctggggcctcttacagggggtcctcagccccttggtaatcatttagcttggaaaaatcctaatgaggcttcactttttagaagaattttaggataagaggaatccgttccttccatctctgacactgtgcggtcagtcccatcacaaagctgcaagaggcaggagagcccccaacacagaaatctgcttttggagacctaacagacttaatcaatgggttccctaggtggagagacggcctggaaaggctccagaaaagaggacaatcatcagaacctcaaaatgtgtagtgggacacacccggagttccagctcttgggagacagaggcagctggtttgtgcctttaatccccgcagaggcaagtggatctctgtgtgttcacagcagccagggctacatagtgagaacctgtttcaaactcagatgtgatggtgccatttgtaatatcagcacttgggagtaagggagagagagatcgggagttcaagatcatccttggacaagttcgaggccagcgttttacgcctctcctcaaactgagaaaataatggagtcccaatgtggccatgcccaaatgattttattattgacttcttctaatggggttacatattagcacatttaaagaaataaacagtaattatcattttaatttttaactatttaaagtgtatatgagcatttgcttgcatgtatgtaacaccacaagcatggtgcccactgaggccagaagagggcactggatccattgaaattggagttacagaggttgtgagcggatgctgggaaccgaatctagatcctcctgaagagcagccagtgctcttaatgtctcagccacctctccagcctcaaaatattgtgattaaacaacaaaagacacacttattatttctttacttggtttctttttaaggtgccagggacccttcttatattcagtcagacatctccttatgctcccctgtgaaagcttcttagacttttgacctaagtggcctttgacagcactggtcagacattttgcaggattttgcctgttgggatttatctaaaattcttttgcacaatgagaacagggttctggatttggggacagaaaaccttagcgcacagagccctgtcatcacaccctgttctccaggtggctaatcacaggaaccctactgtgtgtgtgttgggtgttggggggagagaacacatggatgagttcatggtgtgaatagagtcctggccttcacatatgagagacaattgctctaccactaatgcctccctgactctcacctcctgccccatctgctattttgagatcctctatcttcataaaccctctccagagttagccaggtttgtcccatttcccatataaaaaggctgaatcttagaggaagtagggctagtttccctccagtgaagtattgtgatggatggctcagcaacagtattgtttggcatttggcatctttccaattttaaagtaattataaacactcctgcgtttgtcttcatttgtgtgacttcccaagggtgtggtccatatcgggcagggaggggccatgattcaaaggtcacaagggttttagccaaaagaccctgtaaagagatggtacctacttacagtgtttcagcttctagcctacctgcttttttctcaagacagagtttattctcttgcttctttagcacacatttttttttcttccccaggctcccacaatgtcttggcaccacatgttagttggctgattgcaaaactcaaggttgtttccaaaggataaagatttagttttactgataaaacttttaaaatgaccacttaaaccctgtctcacaagacaaaaatccaacaaataaaatgagcaaatcctgggctgaagagatgtctcagtgcttaggagtgttagctgctcttttaaaggactctggcggatccaattcctagcaccctaatggttgctcacagttgtctataactctagttccagggtatctaaaaccctcttttcatttccatgggtaccagacatacatatggtgcacaaacacacaggcaggcaaagcactcgcacatgtaatataataaaacatgcatacatacacacacttgtgtgtgtgtgtgtgtatgcacccatcaaacaaaacactctgtggtctcaagtcagagagtacctaaagtgtcagtgacttggtctgggtggttagtaatcacctaaagagaacaagccatgacttcctgaagtaacacttctgctggggacggtggttgccaggttctgtaagcaagtggtacatttgccaatctgagactgaacaccactctagcccatttacctgccagacctctaagacttcatcccaaggtgcagagtgctcaaataacattttggtttgttcattgttggttaatctgctgtgcatatatcaattaggattcagggtcaaactgctaagccagaaagcatgttctagaagcagctcaccaggcatgctggccttaacagcatgaaccttgatggcatcgcagggaccctaactgaccccttgggagtcagtaatggatctgtccccctacaggattgtccctgatggacctgggatagattgggttgggttgaacttgatactgtgtggctacttcctcctttctcagggagctggtgagctaagtttaaacgttataatgtatgtgggtatctggtctctatttaagacagaaggataccggggtgaatggcagggcctgaggtgggcagagaagggttgtgttctgagaatgatgacccaggcatctccagagccctcagattggtggtacaaagagaaatgaggcagacagaacaggagtgtcctgcagaagggttgcagtctaggctgtggaaaggaggccccagcacactcctgcctcagaggctggcttcaggcatgccaaggactaatccttaaattgtctactgccagcctagggcttgagccttggagagggccaggctcagccccactgagatcccagggtgttcccagggtgctatctgttaacagatgggaagtggtagagggatgtcagactgtctttggtgacatttctactctttttttttttacagattcctgtcctactgaaaagctaaccgtaagtgccatctccacccacctcagcctctgtccttttttaagatttatttatttactatatataagtacactgttcccgtcttgaggcacgccagaagagtgcaccaggtctcattacagatggttatgagccaccatgtggttgctgggagttgaactcaggacctctggaagaacagtcagtgctcttaactgctgagccatctctccgtcctctgtccttttgtttgactactttccttacatgtctgttgattcggggctgctagggccatagaaggaccacagagctatcctcttccctggcacccaaggttactggtcaagaagctaggtacccagggtgttggcctggggcccccttggtagggttcaactagagagagagggctccaccccacagcaacctccagctcctggctcagccccaggggatttccagcagggattacagacaacagcttggtttgggccattttaagatacccagtctagtctggagggaggctctcttctttcctctgggactcttgtctgccaagtgagaccatagacaccagcagcacacacttacaaagttagctatactttgagcattgagcatttaccatcggctaggcacttgcactccctcttcagctgtctcttctttgactgtgcagccatcgctgaccttgaaatccaagtgtgagcactgcttccggcttgctagaccccctttctttgtgctagacattgccccagagtccttctgactctcaggaatggttactcttgccacatttttggtaaaagaggaagtggcaatccgacaagtcaggagcagttggtggctccattagaatctgcattgtgggagttcagagctggtgctgggccctgtgcccctagctgcctccttggagatcaggggtaggagcacatgcatcgtctcttacagaaggcttcatgtgtgccaggttcagggctttggggaggctacacacaattgctgagtcctctttagccttgtgctggagacctgccctgtgtctgttttcctggggaacatgtgatgatggggctcccctcaccccagctgagggaggggcggagggagggagggagtgcaggcttcaagatgaggcacctgtctgtgccacacactttttgctttttttccccattgatcaagtcgcttatcacttttctctctctctctggcatgcttgcttgctttcacaacagcttttttctttttccttttttttttttaatcaatttacacgttttgttttgttttgcttttcatgcgtttgggtgacttcttgcatgtatgtctgtgtaccatgtacatgcctagtgcctgtaggaataagaaaagggcatcaaatcccctggaactggagttacaaatggttgtgagccactgtgtgggtgctgggaaccaaattctggttctctggagaagcagccagtgcggtcaaccacagagtcgtttttccaaccccaaattaatttgttttttgagacaagatctgatgtagcccaggctggttataaattcattatgtagctaaggatgaccttgaacttctgaccctccttccttcaccaagtgttaggattagagtcctgcaccatgtctggctaaaattagtggaagggagggtgaagggggattcctgttctgggaatcagatcagagtgctaggaaaactctacaatcctgagctatatccccagccctggccttcaaattattgtaaaagaataatcaagattccatatatctgttctctgaatctctcaccctgggtcctttcgaagactgcagatgaatgccacacgccaggtatttcatttccctttgtacttactcgtaaacgtgagaaactgggactggagagatggctcagtggttaggaacactgactgttcttctgaaggtcctgagttcaaatcccagcaaccacatagtggctcacagccatctgtaatgagatctgacgccctcctctggtgcatctgaagacagatacagtgtacttacatataataataaataagtcttaaaaaaaaaaaagaaaaaagaacacaggaaaaaaaaaccacaaaacacattttttaaaaaaaataaataaataaataaataaatgtgagaaaccaaactaacacatttctaaagacgtggctcttttttttttttaatgtattaagatgtggtcaaagacttctctcccagaagttgagaatgaagaggtaccaggagttggtgaggctagaggagactccagcatgtagatctttggttagaaacgtactaactatatgtatatacaaccctggctgagttactcgactctaccaggcctcagattttccatccgtaagatgtgcaggtgctaatattacaaccacgcagtgtggttttgagaatggcacatcactcttaggactagcctggatgtagcgagagtgtgtgaaggactgactgctgctcagcacagagtgaaggcaacatgagttgagggtgtggctcagtgggtaggtagagtgcttgcctattaggcaggaaaccctgtgctggggtcccagccattcacacactgggtgtagtagcaccataatctcagtcttgtggagatgaaagcaggagggtcagaggttcaaggccatcctcaggtattatcaagtttgaggctagcctgggctacatagactgtcacaaaggcaaagcaaatagttgggtgcacacctttagtatcagcacccgagaagtagaaataggtggatctctgtgagttcctgggccagccagctttatatattaagttctagatcagccacggctatatggtgagatattatgtccactaaaaaacaagcaaacaaaagcacgttaaaaaaaaaaaaaaaaaaaccctatattcttgggtatgctacacaggtgccttatgctgtcaagtagcttgtggcaactttaaagaattttaaaagcttttcacagccttcccaagcctgctcagcccttactcctgttcacagcagccacagagaagcgggtcggtgacagatcccagcacgggacacaagttgagcccagtgagccctcctccagctgtagagacttgtgccagtgttggggccacctacctggagaacctgccgctgctggatgacagcccagctgggaatcctttttctcccagggaacctccagagccccgggtatccacggaacacaccaataacaggattggtgagtcctgttgggagatcctggtctaatcatgtgggcagatgggagatgggtgctgagctctggatgggacttggggagctatgcattccttgccacccttcactctgccctacatcaagcttctgtccaggaagaaggccagagtgacacttcgtggggagaactggggacattcactaagagggcacggagtgatgaacacagtgtgtgtcatccttaaagagaaagagagtctttccccactggcctaatacagagccagaaggttcggaatgatgtcagacccttatctagcaacaccacttcatgtctgtcacaacctctgggaacaatgacatcaccctctttcatggctggagaaactgaggcatggagtggggtttcttcttcagttgccaagactcagccccacatctgctgggttctggaacattgattttttttgttcgtcgtactcatgggtctcagcggaagcctagagaccagccctggccctcctgcatttctcctctctgctgccctccagccaggaaaacatctgccatggctcctatgggccctgcttccatcctcacttcccaccacttccgaacatgtatcagtggttcctaacctgtgggttaacagtagcaacattacagttaaggagtagcaatgggaataatggtatggctataggtcacagcatgggggactgtattaaagggtcacagcattaggaaggctgaggaccgctgatgtatattgtccccttcactctcaagttggaatgttaggttcttattctggcattcaaggatggtctcagccagctgttccatcccttctgaggcatctgttctccctctgaggggcagctttctgaattttcatctccctctccctggcttctcccctccccctccccctctcccctcccctttctccctaagctgctctgcagggttatttcctctactatagcaggccttttgagcctggttaccccttcatgtcctagaggtagcattctcacactgtctactctgaacaagccaatgctctcagctgagcttctccacccagtgtcccagcccccagctaggtgctccctagagtgctgctggctctgttctgatgctagaaggacattggtgacagttcttcacattcccctggaagtctgtggtgatgagagctctagagctgtcttggtctcaaagaaatgtttgcagttaactgctctcggttaagctctatttgaaaagaatgtgtttggaaaaacactgccaaaggctccttcagttttccaaggagtcctgatggtgtttgaatccaagatgactaaagggcttggaacttggaaacagggccagagcctgttcagggagggaggtggcaagggttagggatgaggaagggctgctgagggaaggccttaagaggtcctctgggacaccagaactcaggtgactcatttgtcctctgagtgacacaccagaagagcagtctccccatccagtttcctacaaggacaaatgggtctaagtttcctccttctctggctgtacccactttgcctcttctttccttaacttgactggggcattttccccagagctggggtgggggtggaatctaagcagctggaggtaggcagcctgtgatgataaagccagaggatcgggctccataggcatgacagagcagtagcctgtctctgctctggccttggtttcttctgccctcacacctcccgcctcacatacacattactctccaatacctctctgtctctctgtctctgtttctctctctctttatttattggggggcggggtgtcacgtgtgcatgtagaagtcagaggaccacttatacatgtcagttctctccttccaccatgtgggtccgagggatcaaactccggtctttgggtttggcaacaaataccttgacttactgagccatcttgaaatgctttcatctcatacatttagtttgtgtgtatgccactgcatgagtgtggaaatcagaggacaacttgtgggagtcagttctctccttcaactctgtgagtccctctcatagctaaaatgaagtattttaactagcccatataaaagacacacaatccaggtatcttatttacaagccataatcctagactgggcagatttggggctattctaacttatgtcccagccatatgtcccttgttacttgatgtttttcccggccatgtgctcatggttcatgttttctcatgatggccttctctagtctctgtgtcctttcttcttccctctctctacctgcaaaccccaaccaggtagctgaaaacccgcctacttctaccttttgcccaatcacgggccttagctttttattgaccaattaacttgaggagcaaggttacatagcaaatgtggtacacatgaggatctcctcatgccttgtgatctccttgtgcggggtggaggtagccagatggtgggagccaggatttagcatttgaatacaagcagcatccgcctaacctcctacagtaacctcttcttagttgaccccagtaactgacctctggtcccatctgttctttttggtaccagggattgaacctggtgccttttacatactaggggaatgctctactactgagctagtccactcacctttgtttggtttaaattttaatttttaaaattaaaagctgtgtgtgggtgtgtttgagtgtgtgtgtgtgtgtgtgtgtgtgtgtgtgtgtgtgtgtgtgtgcgcgagtatatgtgtgtgcatgtgtatgtgtgcatgtgnnnnnnnnnnnnnnnnnnnnnnnnnnnnnnnnnnnnnnnnnnnnnnnnnnnnnnnnnnnnnnnnnnnnnnnnnnnnnnnnnnnnnnnnnnnnnnnnnnnnnnnnnnnnnnnnnnnnnnnnnnnnnnnnnnnnnactcatttggctgttggagatctgaactctggtctttgtgcttgtataaccagcacttttccttctaggttatctccccagccttgttgttctctggattgtttttgttttgttttatttgtttgtttgacagggtctcctttagcccaggctagctttgaactggctttgcagccaaggatggccttgaacttctgaccctcagggcttgtagcctttgatattacaagcctgtgatcctgcatgtggcccctgctcccttttttctttttctttcaatcagattctttgtctgtttgtttgtttgttcattgtttttgttttttgtttttgtttttcgagacagggtttttctgtgtagccctggctgtcctggaactcactctgtagaccaggctggacttgaactcagaaatctgcctgcctctgcctcccgagtgttgggattaaaggcttttcaatcagattcttactgagttaccgaagctggcttgaactcactcattctgtagcccaagctagctttgaacttgccatcttcttgccttggcttctccacatttacaggtctgtgctccccagctttcatctttcgctagcccctcagatgaaagtcccagcaaaccttgatggaggatgtggcatggcacctgagaccctgctctcagctctggagcccatgggacacacagttcgtccctttctcttgcccttccctctcatgtttcttacacttctctctttcctgggtgtgtgagaaaccgaaatagaagagctgccatggtgcaatgctctcggacatgccggggcacttgagaatcttctgggcttcctgaatctgagggtgtaacccaaaggcagggggtccatgtgccccctgcgtctacccacccccactcctaagttcccttttgagcttccccattccatctgcagaatccattgcaggatcagcagagtggtacaacccccagcctgaggcccagtgagtagagctggttattctggtgaatctaggcttctgcctcccagttgcaaagatggctttgtttccctaaggctccctgactccctgcatggaaaggccatcccagcaacccccagcatcagcttgtgttgagactgtagcatgtactagtgctaggagcctgggctacccattcacttgacactcatgatcccctctgccttctggcagcatgaggtccaggggctgggcacatagacacatggggcccctggctgctgttgcatatcatcaggacccaggtttctggagaacgtggccaatcagccaagtttgcctggactgatgaagctcttgggacctggaactcatctgtcccaggcaagcaggggcacactggtcacccggggtgttttgttttaggcatgtggatgcaagggcagccaggtggctggatgcttccttggagatgtctcctaaccttacctgctgacctcaggttctttaagatttatttattctatatatatgagtacactgtcaatcccattacagatggttgtgagccaccaggtggttgctgggaattgaactcaggacctatggaagaacagtcagtgctctttattgctgagccatctctccagctccctgacctcaggttcttaaccatgcagaggattagattagtggatggtgaggggctattagtgggagtgctgggtctcagagatggcacttgagaagagtgagggacatgtgtggctctgatttgtcccctggtgttcttactaccatcctgcttttctttacctgctatttcctggactgactgcattctgtccatctctgatgacatgcctaagaaaccatgggtagccccatcaatacctctctgtgtaacagagaggctgtggtatctgtgcgaagtcacccagcacatgaggtggtcctggtctctcctctctcacccacctttttgccttacagagaaaatctacatcatgaaggccgacacagtgatcgtgggctctgtaaaaactgaagtccctgagggccgggctccagcagggtctacagagtctgagttggaagctgaactagaagtggaccatgccccccattacccggagcaggagacagaaccacctctgggcagctgcactgaggtcatgttctcggtggaggaaggaggaaaagaggaccatgggcccacgactgtctctgagaagtgacaaccattgttagctggggctagagagcagctgagtgtacccttgagatcaagttagcacctgggaagctaccacaacttgaactgaagacccagcatccaaggtagcccagaatgaagccttcagctgctgccaagagcactggcccctgggccccatcagtgggcactcaccatcaggctgatgtctactgggggagaagccacaggcttgatccaagcttccttgcccacactcctatgccctgccttctctccttgggtctcgagtgatggctttactgccatgctattagcctccagctgtagacatggctccctgttacagaaccagcacctattgcttctactcttgagacagagggaagttaaagaatgaatgctcgtcatcactggcacaaggatggcctgtacccatcacacagggagggcagaatgagacccttttggcacagcctccctgttctatggacctcctcagcagctgcagtgaccccacctgacaagcactgctcaagactatgctttgcccaaggacttcctgtcacacggagatgggagaactgtagtcctggaggttcttaacactttgtgccattatctgttccaccctggaaacgaagaagcattgtcccaaagcctccaggatcaggtccaatgacacctagctcccaaaggaaactctagcaagtgggagcctatctttgaaggtaccctgctgctcacactgcttagcccacgcccactgtgaggaggccgttctggtgaacatacctgaagatctgcttttaatgttttgttttgtcttgttttccttttgaggtactgagcttgaacccctggctttgtgcatgccaggcaaatgttgcagggctgatcccacccaccccagaccagcatttcatactaagcactaaagctgctgtcactcacagcctggctcacccactggcagctgcatactcttgtatcaagcagccaactggatgacacatctgctctgtggcagcttggagactctggacttacccttgggccaggcagggagaattctgtttactcactagctgtttgctgtctggaggaagttgggaccctgtcaagaatcacgaggggagtttctgaaaccgcctgaatatttggggaaaaactggagcagctgagtgccatcagaggcgttataccacagtctggatccaggccagaagggatgtgtgggggatgaagagttgcccatttgtcttgtgcaaggacacggtggatatgtgggcatacacagtggccccaaagccatgtcatgatgaccacatggataccacacttttggaagatattgcccaactttttctttttctaagatgagatcttgttctgtatcctaggttagattcaaacatgatatgtagctcatgctgaccctgaacctgtaaccttcccatcttaacttcctgagggatgacaggcttgagccactatgccagactgccacacatttcagcaaagtgacatattcccttacagagtggctcttcacacaatttttgaccctctaagaatccttaagggcctgttaaaacaatggatttgtaaggctgaaggcttatcacagagttgagtagtgagaggtcctgaacacgaagggtgccaggggtctggtctgccgccccacccccacccccacgccatttcccccaggcagggcttttctctgtgtgcacgatactcacagccaagggcaggagcctttgaccagctgtgtgccctttaaatttctccctgtccacccgggcagtctctttttccctgtttatgtcctgtcctccaaggatgctgggaataaagggtctctgctcacacggctgcctttggtatttgtagaatgaatcgctggcctctccaaggctttcttcccacaagcaggtttggaccatgcaacttcggaaaagagggaactccatgtagctggtggagccgtgggtctctggaacccaggtcttgtatggctgagcaagttccaccaccctacacacagaacagggcagagctccagctatatgcagccagaccagagtttccccctctctggcatctgtcctctccattcctaagactgtagcccagacctgcacctcacctttagcctgacacagaacctgctgcttgtttgccatgtagtcgggccaggaaccagagctcccctgatggggaacttcctagctctagctgttctgatgttcagaacagtgaagaatcaggcccctgttctcaagggggcaatccctgtgcggtgagcgaccctgcccccatcacttcctgagcagttatctgcagttggtgtctagttctttgatgctgttgctttccaaggcagttgggtagaatctccaggacctgacaccagtctctccgatgggacaaaagggctgtcccccaagttgccccttctccctcttgacttccttcccaacagtgagtctgcaaggactatgtcctggccatctttacttgggcagtgttgcactgagctgagtatacatgaaagtgtactgggataatggaagtccccagctacagttttctacatgtctcctcttgcatctgggggattggtgctcagagtcaggttcaaaccccagttctctcagagaccaatagggagcttgtttgagaaagtggaggccaccaccatctgttgctatagcacaatgtttgagactgggaaatgtattaagaaaggttattcgggctcatggttctgacagataggaaatccacaaatgagcagcctcgtctaaggaggcacattgactcactgtactgggaaaaacagggcaagtaggttaaacatgaggccgaactgttctcacagtagctttcagtcttcagacagtgtggattgactcctcaggggcccatggagttttatggactatgagcacccttagtgaccaaaccttcctgtggtcttcaccttccactagtgctccaatgtcagtcagatctcagcatgaccttcaatgagcttcactatactcaccttaaggctctattttctcatctgtgaaatgagtattagtcttgacctgagaaggctgtgggcttcccagagatgccactcatgattagtgactttagtttttattccatccaagtggtcacttggtccagagtaaccctttcctctagcatataagagggtccccacagaggccacaagatagtacacataggtttcaggaaaaaaatatacttaatgatgattggttctaaagctagtcctccaaaatctacttttagtctagcctgatactttgcctctcttgtagcctcaacaacagtgcaggttacttcttgctgaatgaggaaccctgggaactcttcagttcagtcagaggtctatctgtgtgtctaaaaccctagctatttatttgaggtccctcctggttctagtgccttccggaacacactacattctgttcaagatcttcttcttcatagcagccctttttcaaaaacacatacactgaggcaagcccagctagcaaagaatttctggcacacagctttcctcccagggatcctttgtccagcaggtgtgacattggcttaagcttaagatccagtctgtgatgtggtggtgaacatgttagtaaagtagagacagggggatctctgtgagttttagtccagctcctgggtagtcagggctacatatagagtccctgtttcaagcccagtttgtgaattacccctatttgggttccaggacagaggcaagacagtgtctgcaatgacaaggttggggacagcttcccaccaacactgtagttccacctgagtgaaataagccagctaagcttgaatagccgtgaaatgaaagcaagaatagccagtgcaaaggctctgaggtgaaaaagctcctggacttgagattcaggaagaatatagccatacaggaagcccagtgtgtggagagaaaggaggtgggtggggagaacttgcccagcgatgcctgctgagccattacagagcacttagggtgtatcaaaagaacactgttccatgctcagttttatggtcctgtaagtacaataaacgtttcagatggagtgacaaaagccaaaccacaggggcatcaaaagtcccaagagcagatttcaggggaaacttaagaaggctggaacaggaagcagctgagcaggcagcccacaacattcccaggtactgctggggagctacaggagaagggttcagggaggacaaggtttctctttcttctgggatcttccaagtctggatggagaagcctggagaaggcttggagaaccctgggcattggttatcctgtcatctgagcaccacaggatttatcagtagccctgacaaagcatggggacactttgtcatgggaaatagtggaggttatggctacgggcgagacgggcctccagggttcagtttcagctcagccagttcccagccacacagtttcacactcttgccacttgtttccggactgacagcatggactgaactctcacctggcacgaggctgggatgttgtggggataaagtgtctagcccagctagcagttttcatggtcactattagctgccttttcagaccgtttgacttcaccaagcccttctttagtctgtgtctgcacctaggatcagtcctaggtcctaggtgcctgcttctctgggctctgagtggaggctcactgtcccacacttgcatgtttaaagagttggagtgcatcctctcaactccaactccagttcccttcctggatgcaggtggcctggctatctctgtggtgagaagtaagattgatgctgtgagcgttataagccgctttcaggcaagtttcagctgggagttgccacctctgtgtgatgtgaccaggctctatcacacatcccctgccttgatggactggaccttgagggaccaggagccaaatttcacctttccttccttaagttgtttcagttagattgtgatcacagtgatgtgggaattaaggaggagggtgtgaggtatgtgtgttgcacatgtagatgtaaggtacacacttctctgtctctttgttatcttacccccttgagacagtgactttcactgaatctggaactaggctggcaactagcaagccccagtgatcctcctgtctccacccttcatagatctgggttgtaggtgtatgtagccacatcctgctttttgcatgggtgctggagatttgaacccagcccagtctttatgcttgtttattaagtattctgtcttacttaaggtttctattgctgctatgacacaccatgaccaaaaagcaagttgggaggaaagggtttatttgccatacacctccatattataatccaccaccgaaggaagctaaggccggagctcaaacagggcaggaacttggaggcaagagctgatgcagagtccatggatgagtgctgcttactggcctgctccttgtgacttgctcaacctgtttccttctagaacccaggtccaccagcccagagatggcaccacctacaaagggctgggccctcccccattaactactaattaagaaaatgccctacttgcttgattacagcctgaccttctggaggcattttctaattgcggttccctactctctgatgactttagcttgtgtcaagttgacctgagactaagtgtctaccacatattcttacttacttagccatcacctcacgttttgtgcatactcaacagggattttaccaaaagagctgcacttccagacccttatgtgatattctgtccccttggattatagggatgccttggatcttatagatccagagagctgggtcagagactaagggtgcttgcttccaagcctggtaacttgaattcaatacctaggacccagtagtagaagagaaccaattcctcttatacacacacacattcacacacacaattcaaaataaataaatgtaaacacatatatttataattcttaccagctacttgtctttctttttttagataaggtagtgtagtattacccaatttagtcttgaattcctagactcaagtgccagtgtagggatcacaagtcctgtggtcttcaaatatgacatgcatcgtgtttgctctatcactagcaagtagattcagagcctagaccccaggtaccagaagtcttacacgcgttctcgcgaccagccaggaagaacgcaacaaaccggaatcttctgcggcaaagctttattgcttacatcttcaggagccagagtgcaagagagcaagagctctattgcttacatctttaggagccagagcgcaagagcgctagagtgcaagagccagagcaagagagagaatggtgaaaccccgtccctttttaaggagaattatcctccacctaggacgtgtcactccttgattggctgcagcccatcggccgagttgtcgtcacggggaaggcagagcacatggggtggaaaactacccttggcacatgcgcagattatttgtttaccacttagaacacaggatgtcagccccatcttgtaacggcgaatgtgagggcggctccccacacggaagacttttgagaacaccctgtgtatcaagcctattcatttcccttgactactttgaggcttttgtatctatgtatgatgtgtgtgtgtgtgtgtgtgtgtgtgtgtgtgtgtgtgtgtgtgtgtgtgtgtatccacatgtgagctcttgaatttctgaggttgaagaatcatactctgttgtttttctcctttattctttgaggcaaggtctctcagtcaagctcagatctcactgatgtggctaatcttgctagctggcttgctctagggaatccctgcctctgtattccaaggctgaaattacaggtgggtttttactttctccacgctttgcccagcatttattctggtttctggagatctgtactgcagtcccctcactgtatggcaagtactctaaccacctagccaggtctccagctctggattcaagtctttctgtctcaagcatgtgctctgtagtcctcaggaatgtcttgagcacacaagggccaatgcacacacaaatgggcagggatgagtttcatactcccttgtctgactcaagaacattggtggctccatttagtttcttttcagaggggaaaactgaggctctcagagctcatgcctggccacctgagcaggggacaggatctggcatcttctagagttggatggaccctctctcctgaaacccaatggctggtcaaactgcaaggagcctggtcaggaagtcagagttgcagacagattactcaagagcgggatgtcacaggtcgtggttttttttatttgctagctttggaaatgccaggagcttcaacacacatcagggaaggccccaccctggacagagaccctcagcaaattctggacattcacaagatgaaccagtgccctgtggaccaaggtcagtcatcagatttccctgaatgtcacttgacctttctgggtcgcacaaaggggcctcatccctgcctccatcaactcatacatgttatgaggagagataggaccaactccctctaaggcttcttgtattctctcccatgaacctcctgacaggatgctcagaagtggtggctacagatacccctatgctgctgtcgaggaaactgatgctcacagctactaaatggtgcagacaggattcaaacccaggtcacctggccaggactccagttcccagccacttggctgtgatcaactgtggctcaggcagaggtcgcttctgggtttttttcttttctgttgctgctttattttatttgacacttttactactgttgtggaattggctacagggatctaagtcacacgctacactgcctgctttgcctggtcacaataggaatgctaagccctggagaacacgttctggatccagcggctcagaaattcccagacaatcgttgcctcctggcttgcacttcctttccaaagccaagtgctggccaagtgcatggaaccttcagtagctccctagggccactgtctactagtctggccctccacaaacatacctgttagtttccatagctctctgtcttaactgtgtctaaggcccagttgtgacccttgagtggccagcatggaggacactccccagcatgaagtatttgctcagtgctgacatcctgagcttcacttgctcacccattccttcctcttccagagattttccagattacacagttcccaaagcactgactgcttgaggaatggaggccaagtctcagaaacccagaaaaaaaagaaaaagaaaaagaaaaaaggaaagaaaaaaaaagatctgtgtctaagaagaaggttttattcttagtcactgttctattgctgtggagagacatcatgaccaagacaactcctacaaaaggaagcatttaaccaggggcttgcttacaacttcagaggtttagtccattatcatcatagcaggaagtgtggcagcaggcatggtgctgaagaagtagctgagagctttgcatcttgattcacaggcaacaaaaaagacagagacactggggatggagttaaagtccactcccagtgacacacctcctctaataagaccttctaatctttccaaacaattcatcaactagggatgaagcatgcaagtatatgagtctatgaggaggcacattctcattcaaaccactactcatttgctcattcagttgctcaatctagaggcctgtgtggaacagctatcatgtatcaggcagggagcactatgaggcagggtactgggtgttgaggaacattgaaaggatgggggatgggtggtgcctgggtatgcaggacaactctttgagtgtcaaagaccacctgggaaaggaagcctgcagggaaggccttgaccttagggggcttggagctttatagtcaagtagatggcacccagggaaggcttgggttccactctctcctctgcagagtacttctaaaaagcatgcccacaccaggaaagttgcattaaggtggaacatatcttattttgttaaataaatatttatcaggccgggcgtggtggcgcacgcctgcaatcccagcactcgggaggcagaggcaggtggatttctgagttcgaggccagcctggactacagagtgagttccaggacagccagggctacacagagaaaccctgtctcgaaaaaccaaataaataaataaataaataaataaataaataaataaataaatatcaagcccaaactgcagggtcatgatgcttagagccctcacggacagccaaaaatctgagctaaccttacctggtggaactgataaagtttatggtgcgaggggtcgggggaaacctcagggtaagtcgggggtcacagtaggacttgaggatgtggcccaagtttatggggacatgttttagttacttttctcattgctgtgacacactacttggccaaagcaccttaaggaaggaggtatttactttgtctcacagtgaggaaggcatggagatgggtgcgtgaggtcgctgctcacatcgaatctgcagtcaagacacaaatgaattctgctgctcttcttaccttcccattcttgttcaatccaggaccccagcctttggaatggatctccctacacatatagggtgggtgctctctacctcattaacccaatctagaaactccctcacaggctcgctcagaagtgtgcctcctagatgattctaggtcctgtcatacatgctccaggaagagaggcaggggtgctgggcgggcagtcatccggaagttgtactgaccttaggagggcctggagacactggcaccagggggttttccttctagcctgtagcaggaaagcacagctggcatttcaggaaacccttccctacaccaacatgttctaagtctgcatttatttacttattttttatagcaggaattataggcatgtacgtat

SEQ ID NO: 1417 - DNA, 1497 bp, Mus musculus
tttcaccgcgggagagtcagggtgccggcaggtggccaggcgctggagactcgggaagccaagatgagcgccctactcaccgcagcagggttgctgttcctggggatgcttcaagccttcccaacggatcgaccactcaagaccacctgtgccggagacctcagccactacccaggggaggctgccaggaactgctgttaccagtgcccctcagggttgtctccgacacagccatgcccacggggtcctgcccactgcaggaagcagtgtgcacctgactactacgtcaatgaagacgggaagtgcacagcctgcgtgacctgtttgccaggccttgtggagaaggctccgtgttccgggaactctcctcgaatctgtgagtgtcagcctggcatgcactgctgcacaccagcagtcaattcctgcgcccgctgcaaactccactgttctggagaggaggttgtcaagtctccaggcacagcaaagaaggacactatctgtgagctgccttcctcgggatctggtcccaattgctccaatccgggtgaccgcaagacacttactagccatgccactcctcgggccatgcctactctagaatccccagccaatgacagtgcaaagagcttgctgccaatgcgggtcaccaaccttggtaatgcagagaagaatatgaccttggagcttccatctccagggacactccctgacatcagcacctcagaaaacagcaaggagcctgcaagtaccgcctccaccctaagccttgtggtagatgcctggaccagcagcaggatgcagcccacctctccattgtccacgggaacaccatttctggatccagggcccgtgctcttctgggtggccatggtggtgctactggttggctccggctcctttctcctgtgttactggaaggcctgtaggaggcggttccagcagaagtttcacctggactacctagtgcagaccttccagcccaagatggagcagacagattcctgtcctactgaaaagctaacccagccacagagaagcgggtcggtgacagatcccagcacgggacacaagttgagcccagtgagccctcctccagctgtagagacttgtgccagtgttggggccacctacctggagaacctgccgctgctggatgacagcccagctgggaatcctttttctcccagggaacctccagagccccgggtatccacggaacacaccaataacaggattgagaaaatctacatcatgaaggccgacacagtgatcgtgggctctgtaaaaactgaagtccctgagggccgggctccagcagggtctacagagtctgagttggaagctgaactagaagtggaccatgccccccattacccggagcaggagacagaaccacctctgggcagctgcactgaggtcatgttctcggtggaggaaggaggaaaagaggaccatgggcccacgactgtctctgagaagtgacaaccattgttagct

SEQ ID NO: 1418 - protein, 472 aa, Mus musculus
MSALLTAAGLLFLGMLQAFPTDRPLKTTCAGDLSHYPGEAARNCCYQCPSGLSPTQPCPRGPAHCRKQCAPDYYVNEDGKCTACVTCLPGLVEKAPCSGNSPRICECQPGMHCCTPAVNSCARCKLHCSGEEVVKSPGTAKKDTICELPSSGSGPNCSNPGDRKTLTSHATPRAMPTLESPANDSAKSLLPMRVTNLGNAEKNMTLELPSPGTLPDISTSENSKEPASTASTLSLVVDAWTSSRMQPTSPLSTGTPFLDPGPVLFWVAMVVLLVGSGSFLLCYWKACRRRFQQKFHLDYLVQTFQPKMEQTDSCPTEKLTQPQRSGSVTDPSTGHKLSPVSPPPAVETCASVGATYLENLPLLDDSPAGNPFSPREPPEPRVSTEHTNNRIEKIYIMKADTVIVGSVKTEVPEGRAPAGSTESELEAELEVDHAPHYPEQETEPPLGSCTEVMFSVEEGGKEDHGPTTVSEK

SEQ ID NO: 1419 - DNA, 100822 bp, Homo sapiens
tcgtccaagcgttcttgctcctataggcacattagacactgcagcaagagcaggtctcataggagtggtcctggcagagccccaggtcttgctgggcaccaggtctgcttgacagaccacacaggcctggatggtcaagtgctggtccctggagtacaaggaagggaccccaggggtcagtgtctacccatatccgtagatgctatcaacaggttctttttttttttctttttctttttttttagagtcagggccaggctgactgttattcaggctggagtgcagtggcataatcatggctcactacagccttgaactcctgggctcaagcaatcttcccacctcagcctcctgagtagcttggaccgcaggtgtgcgccatgacgcccggccgccaccaatatgttctttccttggctcagttcaatggcccctgcagagccggaaggcctggctcagaaagaaccctggcgcctgtgcagtgtcagtgcaagccaaggcagtggctgctgtttccactgccaagcatgagagtgggacgccagccagtggccgggctcaggccccaaggaaacacaaggtgggctgctgctttggggacgttgtttggagtcacttgaaatgcaagagtgacccccagaacacacaggccccccaggaggtggatgtggggtagacagcacaggccatttcttgctaagcatttatttccacactatctccttggacagataacaggattgttttcaggtaataggtagataagctggccgggcattggggatgatggatgctgagtctgggaggcaagtgtgtgctcacacagatgtgtacgtgtgtgtgcatgtgtgtgtgcctatgtgtacgtgtgtgtgcatgtgtgtgtgcatatgtgtatgtgtgtgtgtgcagcactgaaacaggccgctgaccgctcccaaagccctgatgttccatcagcctctgcagtcacagccaagcagacccttgagacccctgccatctgcctcccttgccagagtctgaaagcttggggtcaaggctttgctcccctggtgacaggcctggaaaaggaaaatgatagcaagcagcaaatacacacaataaagccgggcgagggcagaggggccgggtgggggctcaggaggctggggcctgggggctgtccctgcactgactggctgtgggactttggcctcagggtcggtgtaactggggtaggggagcggttgctggatgtggcgacccccacctcagctctcacactctggccagtgtctgatgcaaaccagaacccagtgaaatcaccatgagtcgatgggggttatggatggtaactgatgggtttttctcaggccagatcacagttccagtcttcagggggaggtccccatgagtctccagatctagctgaggcttgagttgtggccacgccttagtttctccacattgccagggttttgtgtctggtgagccccaggccagactgggccttcaggcctcctgcctcctgtttggagggagggatgattctgggagtggggcagacccactcccagccacatggagggaatgaccagggagattccagagggattttctgaatgaatgccatatgctgatgggcagctcctgctaggaacagggtccctgctggcactttctgcaggcacccacggcatggatgatggcgcagatgggctggcagcatggctgtgttccgggtttcactttcagagcagtacctgcccttctcagccttgcttggtgttcttggaacacccctagaccagccccagaaggtgagtctgacgtccgccatgtctgctaggacccctgtccttggtcattcaagtcattcaataaagattcatgaagccaagccctgcttatgtcagtggaccagacagacacaatccctgctccccaggcggggaaagttagcaatgagcaaataaacgatgccacactgtggtacgtccctgatgaacagggcgatgtggcagagagtggtaacatcagctggggtggtcaggaaaagcctctctgaggaggttcatctgagccaacacctgaagatgagcaggagctgcggttttaaaatgtgtgtgtgttaatagcttcattgaggtataatagacacacagtaatcttgaccaacttaaagtataccattttgtaagtgttggcatgtatatacatccttctccacaaccaagatgaccactatatctgtcaccccagaagttttctcagagggacaacactttgcagagctgggggaacaagttttcaggcggagggaccagcgagcacaaaggccctggggcagggacaagcttggtggcatcaggagagaaaggagtccactagggagtgtgacggggtggccggtgccccacctggggccttctcagccaaggtgctgagctcaggtctgaatctaagtgcttccacaacaccctctcgccacactgggccatcagaatgccagggcctgccctccaccaaggctcttctgagaaaccagcccctgcgacatctgccagggacttagcaaggggtttctccaggaatgatttacattttaactgggaccttcaattccttgacccaagggagtgactagtgatggagcttcaagacctggatggacccttgatcagtttcttcctcagggctctatgttctcagccttcatgggatcgggtgtgctggtttcttgaaaattctgagttgcaagtcattatttgaagacaggggtgcctgtggccccttccaatcctccagcgctggtcctgggctcggaggctcttcctgcctgattgtcagagactcggcccatgtggaggagacagggagggtgggtaacgggaaacacaaggccaatccccttagagcaaactcccttacaacagatggctctgggggagcacagagcaggtcccaggcaccaagaaatgtgggctatcctttggccatcaggacgacgggatttggggatgcaagttttagcaactgcgaccaccagggcagaggctcactctagactcacaaacctgggtttgaatctggaacttactggatggcttaggccaatttcttctctgagcatccgttttcccatggattttttttttttttgacagggtctggctctatcacccagcctggagtacagtggtgcaatcgtgtctcactgcagtcttgacctctagggctcaagcagtcctcctttctcagcctaccaagtagctggaattacagtaagtaccaccacacttggctaatttttgcatttttagtagagatggggttttgctatcttgctcaggcgggtctcaaactcctgggctcaagcaatctgcccctcttggcttcccgaagtgctgagattacagatgtgagtcaccgcactcggcttttcttggacttttactctcagacctccctgcacggacgcacccatgggtgcgctctcctcgcctgcacctccgatgaagctgctgccaccatcggttggttccatttccttcttgcactcagtgtctctggttccatgattaatattggactaggcttggtttcctgagagtctaaatgactcacctccaactcacctccatttacaacggccctgctgagcaagaaggtctggggaagacggggactcctcgatagggactctcagcccacggagtcatccccaccaggctgtgggccttggccaagtctctttccctctctggtctcagcttccttcttcgtgtctctgggggatggaaggagatattggaaatcggaaagcccagctgctaggcccaggagttcatgagggttcacagccatgaggccaaggttaggtgaaaggtgcctgagctgggaggctggctgccactaagggaagggcttgggggatgggggccccctccagaggctccaactgagagagcatggccttcccatggtgctagtcacatcaacctgtttaatcctcaccagccctttgcagtagatcttatcattttcccattatagatgaagaaatggaggctcagagagggtgagcaacttgcccgatttacacagctagtaaatggcagagatagcatttgaccagggctgtctggttctaggacctctggcagccagaggaacagagctgtaaatgctctgcaggagccgccaggcccagaggaatccaggcctcccctcttccccaccggggccttgcaacaaaaggacttctaagcagatcattgaccctagcccccccattttacagatgagggcactgaggacccccaagagaaagtcatgcagctaaatgccaacctgggccacactggggctcctgactttccatctagtctttccacacctatcaagctggagccaagactgagcccaaatctggtgccagaggttgggggaagtgttcccacagagactgtgtgaccagcaggctgggccatggaggtgtaggaagtggtcacccacctgacatcacctgaggggccaggaaaggcctcagacccccaaggttccctcctgtgggcctgccctgcatgagtcaccccttggctggaacagtggatgtcatggtagcatgtttctcagaaaggggaacccccagccatgagcattttagctgtgctctggaatgggaggtctggggccatagcaggggcctggataggcagtgggagggggcaaagggaagtagagccctttccatgtctttcttgcatttccaagagctttctatgtccatattttattcaaggcccattacaaccttcagagggcagcccagtcatgcttcaacacacatctggcagaaggggaaactgatgctcccagtgttccccagcccctggtattcatgcccttgtgcagtccgctcccacactggggagagccagcctgtataaccaacagaatactgtggaaatgacaaaatgtgacttctgaagctagttcataaaaagcattgtgacttctgtcttgctcacttggggtcacttgctctggaggaagccagcgccatgttgtggggacactcaagcagccccatgggactgaagcctcctacccacagccgtgggagtggctaatcctggaagcagatgctccagccccactcaagccttcagatgactgccgccctggcccacatcttgatggcaatccctgagccagcatcaccctgtcaagtctctcccaaattgctgactcacagaaacagcgcaatataatgtttattgttttcagccactaggttctgaggcacatagcaatagataataatacattcagagaggagaaatgacttcccaaagtcacatggccagaccaggacttatacatcagtgctctttctcctggggaaagcaagggtgagagaggcctggggagggaaaagaaggcagctgaggcttcagagtcagacagggttggagtaaatcctagccctgccaccctcatgctgtgtgacctcaggcaagtgacttaactactctgagcctcagttcatttataaagtggggatagcaatactgacttgaaatcttgatgccaggattaaatgtctgaccaagggcctggtacacagcaggagctcaatgaatgacactgttaatgttactatgcagaatctttaagagcatccccgagggcctcacagccttccctcctgcccatgggaaggggcacaacaaacctagttctggagagccagtgcccctttgcttagtttccaaccaggcttggtctaggggtgtcatgcttgtgggtgtgcattgctggggttcacccaggcagctgagaacccctaatgttggtgcctcaaaagggcagggagatctggggatgtgagttggagggagcctgacatgggtcctgccgattaggactggtggaggccaagggtgacccagagaagcctaatggagagtcctactgctaccaaggctcccaagaaagttgctcagaaaaggtgcacctgcggctgggcgcggtggctcttgcctgtaatcccagcactttgggagaccaaggcatgcagatcacttgaggtcaggagttcaagaccagtctggccaacatggtgaaaccctgtctctactaaaaatacaaaaatcagctgagtgcagtgatgctcgcctgtaatcccagctactcgggaggctaagcatgagaatcgcttgaacctggggagggggaggttgtagtgagccgagattgcaccactgctctccagcctgggcaacagagtgagactccatctcaaaaaaaaaaaaaaagaaagaaagaaaaggtgcacctggacctattgaagaagaaaggccccagcctcccctctctgatttccagcctcctacctgccagctgctgcctgggccagaaagaaccctttatctgctaagggtattttggggccatttgggactcgggttcccagctgttggaggaagtccctgaatttcctgaaccaagttgggaccttgtgtcttgctcagcatcactttggggacacagattcccaattccccttggatggcttcctactgcattcaccttcctcacctttcctccaagaagcccaccgagctgagactgtgtgagcaagcgctcctcgctccccagtctcctgtagcccctcgggcttggcttccttccacagcttgctctggagggccccacgaccccacaacaaggactgctgctgtgccttgcacagagcctagggacttccccttctactcttcacagcactttcataccacctgaaacctgccgagggcacccgggggctctatccactgcctgcttttaagagtcccatgaatggctgttttccttggttgctaccagcccatctccccctgggatccagctggctccctggccacaaaatgtgccttccctccacttaagccatgtgtcagctactttcctgggcgccctgggggaattctggttctcaggagtacacagtttcctggggcagagggatgcatgaaccagtcattatggttatgacatgatgagatcagatctagaattgcggcacaaaaaatgacagaaaccactttttgactgggaagagggctgggggacaggagacactgccaggaaagcaacaaggaggaggtggcattggaacaggttaggaagatgatcaggagtctgtgtgcgtcccaggtggaggccagcgtgggcaaaggctggcaggggtgagaaggctgcacatttggctggagtataggtccaggagaagtaaaaaggcacaagggaggagtcagcccctgccaggctgtgagcagacttgtgcacccttgcatttgggtgactctgacccaggggagccactgcaggggttcctttcctgcagaatgggcataaaagtaggaccttgttcatggggttttcatgaggatacaagaaaccaatgcctgaaaactcttagcacaaaataagcactcaaaggtagctgttattgttatcattaaatgaataatataattttctacgtggtcctctgccaaaacacacaccatacttccgcaagggttctctacaggggagtgtcttggtgagatgtgtgtgctagaaaggtctctttggaaatccatggagggaaggatatgagggagagacaagtttccacaacatctatagatttatcctttttaatggatgtgcaatattccattaaatggatgtaccacaatttccgtaatcatttcttgttgtgaatctcagagtatttcaaaaatttataaataatatataaggaaatgttactgtatagttttcttttttctttttctagttttccagttaaattatttccttagtttttcttcactgaggtgaaattactgagccactcacaagtagtacacatttttttttttttttggcttttgctaaaaattgccatactgctttctgaaaagggttgtaacatttaccagcagagtatgaatgagtattctggtctcaccacaactttggggttggatttaccaaaattgtttttataaagcaaaaaaaaaaaaatgatgattgtatagatctaaaaggttatcaaaggttgcttgaatttgcatttctttaattactaaaaaggttaaacttataaaacttgtaattgatttttatttgtatttctccttgtgcaagctattttgatgctgttgttcatttatttattcaaaacaccagcccttctctctctctcttttttaattaaacaaaaaatagagatgaggtcttgctacgttacccgggctggtctcaaactgggctcaagtgatcctccaacctcggcctcccaaagtgttgggattacagatatgagccatgtcacccagctgccagcttttctacttttgtagtagaaagctctggactgggaagcaggtgtcttgcgttcctcctgtccctgtctggttctgtcattatcacaggcaggtcacttccataattgcttacctcattgtttaacatagtcccagctcaaacagcctaagatactgggcctggtacatccagaggagagtctggaagtgggtctcttgggaaggggcatgatggagcagttttcccaagtggagtccagcagccccaggagggttgagcatggagtggtcagttgtggagaccttgctgggaagttcctggtgggaggttatcactcctaccctatagggccttcacctgatggaggcctggtacctcgcaggacagatcaaggtagacacagaagccagagtatccttaggctattctgggctcagggaaaataactggcccacccttaattagagcacctaggactgcctgcctatttctgagccttggctttcacatctgaaaaccaaacaaaatcagtcaaaagaacccttgacctgtggcccacccagcagatgctcaacacagacacacggaatgtggaataaaaggagcaaagagaaaacccaggggatggggaagcactggaagggaaaatcattcaccagcaaatgagaacatagtacgaggaggcttgaatcatttctgttaggagagagtgccagccgcctcctccaggaagaaaactctaaagggtcaggcctcagggaaataaaatgatctataccatccatcagttcctccaacattcagtccatccatctaccaatccacccacccatttacccactcacctgctgctcatccatccatccatccatccacctatgcatccatccatccatccatctatgcatccatccatccacccatccacccacccatttacccactcacctgctgctcacccatccatccatccatccatccatccatccatccatccatccacttatgcatccatccatccacttatgcatccatccatccatccatccatccatccatccatccatccacttatgcatccatccatccatccatccatccatccatccatccatccatccacctatgcatccatccatccatccatccatccaccaatttatcatccactcactgattcattttacagcaaatgcttatgaatggggatgggtgggtgatggttgctttttctgcagtctccctaggccagttgtcccttccaaagaatctcaagggcatgggagaaggtcctggctgatcgtgtcagggacaggaaactactcacatttcaccgtttcttggggcaggagtggaggtgggggcattggaacccccttggggcctcctaatatcctgtgagtccccacctccagggccagaagctgcctgcctccgctccccgcagcccaggtgcggcgggcagcacactccctagagccaggaccactagttccgtcaaatccggggcgggccattcaaacagctaagggaggcgtctcctagtgtgccttttcctgagtcatctctgcacgtgtttgcccccttttttcttcgctgcttgtagctaagtgttcctggaaccaatttgatacgggagaactaaggctgaaacctcggaggaacaaccacttttgaagtgacttcgcggcgtgcgttgggtgcggactaggtggccgcggcgggagtgtgctggagcctgaagtccacgcgcgcggctgagaaccgccgggaccgcacgtgggcgccgcgcgcttcccccgcttcccaggtgggcgccggccgccaggccacctcacgtccggccccggggatgcgcgtcctcctcgccgcgctgggactgctgttcctgggggcgctacgagccttcccacaggtaagcgggtgacgggcgcctggggaggtgccggcggtccagagcccggacagtgtggggtgcgtgggacgcaagggaggacactcctcaccccgttccctgcccagctggagtgagggggcgcgggtgacaagcaggaacaccggaatatgctagcacccacaggtgggaggctggctgaagggctagtggtggggggcgcctccttctcaccccgcgatggctgggactgattcattcattcagtgtgaattggactgagagcactgccatacgcgggaggcgctctttagcccgcctacctgcgggcccgtcggggtcctgggcagatcaggtgaggccgtgggagtagtgggcaggccagatggggcctcccttagccatgggaggttggtcgtccgcgctctaccctgttgtgtgcgcggtcccgtttgcccccttcctaagctggccactggctggagggtcaaggaaaggagggagagttggctgtgggtgagagtggggtgagggtgcaggaccaccgggattagcttccccgatccgcgtccggcaaagcaacgctgtggattgaattcgctggagcacgtggtgggcatttgcccctggaagaaggtcagtggtggggctgaagtctatggtgggttgcctcagaattgagtttggggactgctttaggaaaactgagcacttaccagtggccagcgccaaattaatcactgtggggagaatgcaaagtaaccaggcgtgtttcacggagcccaggggctgctggagagagaggccctcagctgacccaggaccccggtggacccctgcatagaaccatagtaggtgcgagtggatgcctgctgaatgatacagagggaaaggaaggagcaggctgttagtccagcggtgggtcacggtgggggagagggaagacccagttcccctttaatcctacaggaagagaggactccatgctatggatcaattctagtcatctgaaccttaggcagtgggaggagagtggcagagtgggctttaggcaggagggaggaactatgcagcaaaggaggaactatgccctcttccatttccaatgggcaatgtgaggtattccccctttccccccaagagggcagaggggacaaagccctggctagagacaccctgtcccagctctgcaagccctcacctgggggaaggtaagagtttggagtgccaaggtcttggggagatgaagggaaggaagagatgtgagaggtgcttggggggctttgctggtttggtttggcagctgaagctcatgtgcttcctttctgtagagtgaagccccctccactttttttaatgttagagacagggtctcactctgttgtccaggctggagtgcgatcataactcactacagcctgaactctcataccaaaccttttttttttttttttttttttgagactgagtctcactcttgttgcccatgctggagtgcaatgctcgatctcggctcactgcaacctctgcctcccggattcaagtgattctcctgcctcagcctcccaggtagctgggattacaggcatgtgccaccacacccggctaatttttgtatttttagtaaagatgaggtttcaccatgttggtcagtctggtctcgaactcctgacctcaagtgatccttccgtctcggcctcccaaagtgctagggttacaggcatgagccaccacacccagcctcccataccctttttaaaataaaaatactatatatttaattgcacaaggaatatataaatatattctcaaagcaaaactgtaaacgctacagataaagccaagtcttttgacaccgcctcatcctgatcccttcaaagatataaccaccataattgatttggtgtgtttcctttgcagacctttataaatgcatgtccatatttatattgttttaatagacatatatatagttttccatatactataccctacagtacatatggttcttcatttggctttataatgtctatgaggcatcttggtgagctttccatgctgaaacttacagatcctctgcctatcttttaaaatgctatgtgatcttttgccaaatgggatgtttcatagtttatttatgtcctggatggatgggtgctaaggttgccaccattgttctttctttctttctttgttctctactacagtgcacagccctatatggatgcttttggaaataaatgtctgtgattctttcctagacaagagactgagaagagaatactgaggttgcagggcgaaaatgcattcaaattaaaagacaccaccgaactgccttccagggtggctggacaatttaccctcccgctagcagtgcaagagagtagtaactttcccacatcctaaccgacatttgatcttatcagcattttaatttttctcaatgtgattagtgaaaagggttatatccttgttgccttaatttgcatttctcgcctaccggggaagctgagcatctctctgggctcaggcactaggtcatttcttggcaggagtcagggagtccttggggaagggactacctgcccaacacagtactcctttttgcccctcaagccttctcccacttctgttttttccagtaaaggttcgggaagctcgttattttaaaaaaaaaatcccaaattagggcttgaatttccttgagtttaaaatttttttttttttttttgagatgaagtctccctcagctgcccaggctggagtgcagtggcacgatcttggctcactgcaaccaccctctcccaggttcaagtgattctaccgtctcagcctccctagtagcttggattacaggcacttgccatcatgcctggctaatttttgtattttagtagagatggggtttcataatgttggccaggctggtcttgaactcctgacctcaggagatccatccacctcggcatcccaaagtgctgggattacaggcgtgagccaccgcccccggcctaaatttttttttattttttgggacagtctcactttgtctcccaggctggagtgcagtggcgcaatctcagctcactgcaacctctgcctcctgggttcaagtgattctcctgcctcagcctcctgaatagctgggattataggtgcctgccacctcacccagctaatttttgtatttttagtagagatggggtttcgtcatgttggtcaggctggtctcgagctcctggcctcaagtgatcctcccacctcggcatcccaaagtgctgggattacaggcgtgagccaccgtgcccatcctgaagttcttttttcatctctatttgatttttcccaagacgccatcatttttcgcctggtattctgaggcaggaatgctttcttgctagctggcaccatctgagagttggcctctgatgcttcgtatcactgtcttgtccaattgtgtttttttgtaatatgacccaggattaactggtgcatatctgcagagaaaaatttattcccccatagctccatccttttcatccaggcaccatgtggtggggttgcggggcgggggaagccccagctttcctgtgaactctgtagacttagaaattccccaacatcatgttccttgccagtgctaaggctaaacaagccttcctcccacatccatgtacccccaattccagccagatgtaagcatctttgctctgggttagtgtgcaggctgggaccaggaaggttctcatgaaagtatcttagctggggccgggcgctgtggctcacacctgtaatcccagcactttgggaggccaagacaggcagattacttgaggccaggagttcaagaccagcctggtcaacgtggtgagaccctgtctctactaaaaatacaaaaattagctgggcatggtggcaggcgcctgtaatcccagctactcaggaggctgaggcaggagaatcgcttgaaaccagaaggcggaggttgcagtgagccagcactcccgcctgggtggcagtgagactgtatttaaaaaaaaaaagaggaattttagctggggtgatagaaaagctctatgtgtgactcctccatctagcaatttaactttaaaagcttagctagttactccatacagtgtagtgctaatcgtggaatttcagggagtggcaagagggcaggagagattttctggttttgttttgcaaaagggacatttccagggctgctcaaatcctgcagggaggcaaggacggcgggggggcgggggggggacctggagaggaggggaccctgaaggagtggaaggagggtctggcttgtcttaaagccatcccttcccagggcggcactagtgctctggggtcagggagtcgtgttactcagcttgagagcagtgagtgccggaaggaggggcgtttactgtaagtttctgcttctgctcccactcatatctgacttagactcgtttcttgagcagattgtgattcattctaaggtttttatactccctcatcacccttcttcacatcaggacaatcatcagaaggaaaatggggctgaaggatgactgtgtctggcccgggggagtcctggaggcttgagggtccttggcaatgacagtagatcagcccagcctgggccagcttgtccagccggtgcactgaccctgggtgtggcccatctgggatcacagtcctcatttcacagacaaggattcagtgcagaggcccagaggtaggggagagtcttgcctacagttccaggactggtcggggtagagcccaccacagactagacacgcagaatgtcaaaaaaaggcagctctcggccataccagttctccacttctctctctcccctcccaggtccacccaggggatactggggtgggggtgggggaccttcttccggtatctatggttgaaaaccactgggcattctcgtggccttgctggtggggagggactttttatacatggctcagtctagttactccctgaatgcctaagtcttttggtgacatgcaagtattcatgcatgcatgcatccagcagatctgaaatgagcagctgttctgggtcaggcatggctccagggacttgcattcagcctctgcctgtatgccccccgtgacaggatgcttgctccttgctgaggcagctcacaccatcctgggttagctttggcatttagatgatcttcatgatatgctgaaatctagtttctttttctttctttttttttttttgagatggagtctctctctgtcacccaggctggagtgtagtggtgcgatctcggctcactgcaacctccgcctcccgggttcaagcaattctcctgcctcagcctcccaagtagctgggactacaggtgcatgccaccatgcctggctaattttttgtatttttagtagagatggggtttcaccatgctggccaggctagtctctaactcctgacctcgtgatccacccgcctcggcctttcaaagtgctgggattacaggcatgagccactgcacccggcctttttttttttttttttttttttttttgatggagtttcgctcttgttgcccaggctggagtgcaatggcgctgtctcagctcactgcaacctccatttcccaggttcaagtgattctcctgcctcagcctcccaagtagctgggattacaggtgtgtgccaccacgcctggctaatttttgtatttttattagagacgggatttcaccatgttagccgggctggtctcaaactcctgacctcagacgagcccccccgcctcagcctcccaaagtgctgggaatacaggggtgagccaccacgcctggcctgaaatctagttttgaaaatgagtcacctccctgttcttcagaagcgcctctggcaatgtgaagactgtgactttgggtccccggagtctctcagccagtcacacacctgtcctccaacatttattcctcacgtagcgtgagctcaaggctcctcatctgcctgttctcttcaattcattcattccacaaacacttattgagcaccttctgcatgccaggaagcactccgggtgctgcgagttcatccatgcaccgcatagcagggtctctgccccacggaactgacattccacaggggtgacagtcaacagactgctgctagttgcaatgagaggattagaatcctgtagtgtgagagagacgggcggctccctaagatggggaaaacaggacttgcagacggtaacatacacacggaatgaaaagagggaggcagccagtgggagattagcagaaaagcatccaggcccagggggtaaaagccccaagaggctagaggaacaggaaggaggccggggtggctggagggaagtgagtggagaggggtggttaggagaaggtggcaggaaaggtggtagatcgtgcagacctttgtggactgtggtgaggtttttggcaggggagcaatactgcatgatagatttaaagttccttctgtctgctgtggggggctgggggattggggggagcaggcaggatgggagcaggaagccaggtcattgcattgatccaggggaggggtgagcagaggtgggaatgtgctttttcttcttttcttttctttttttgagacggagtcttgctctgttgcccaggctggagtgcagtggtgtgatctcggctcactgcaagcttcgcctcccaggttcaagccattctctcgccttagcctcccgagtagctgggactacaggcgcccgccaccacgcctggctaattttgtttttgtatttttagtagagacagggtttcaccgtgtcagccaggatggtctgatctcctgacctcgtgatctgcccgcctatgtagagacagggtctcactatgttgcccagtttggtctcaaactcccagggctcaggtgatcctcctgcctgcgcctcctattgctgggattacaggcatgagccactgtgcccagctggaatgtgctttcaagctagaatcaacaggacctgtggatgggtctggtgggagcgcagagggcaggagggaaatcagggatcctgtccgtatttgggagctcagaatctggctgcatggaggtgtcattttgggatgtgggaaaaaacaagcaaaggatagaacaggggttttggagaaaagttctattttgcccatgctcaagtaccagtgggggttgggtgttgaaatgtggagctctctacagagttcaagctgctgatatgaatctctgggtaccagagtcaactgtagaagtcctggtgccacctgggccaaagaccactccccagtagactcaccttacttctattaaccaagcccaagaccccctttttttggcccccacattatctgttcattcgttccaacccaagcctaggctcttttattcagcctggttacagtatatgctagttttcttttgctgctatagcaaattagcacacatttggtggcttagaacaacatgaaggtattgtcttatagccctggtggtcaaaagtctatgacaagtctgtaatcccagcactttggaaggctgaggtgggcagatagttggggccaggagtttgagaccagcctggccaacatggcgaaaccctgtctctgctaaaaatacaaaaattagccaggtgtggcggtgtgtgcctgtagtcccagctactcgcgaggttgaagcacgagaattgcttgaacctgggaggcagaggttgcatcaagctgagatcgcagcactgcactccagcctgggtgacagagcaagattctgtctcaaaaaaagaaaaaagtctatgataaggcagcagagctatttttcttctggatatgctgtagcaaaatgtttccttgcttttttccagtttctagaagctgcctgtgttccttggtccctggccctgcatcactctgaactctccttccatcctcacatttcctctctctcttttttttttgagctcgatctctcggctcactgcaacctccacctcctgggttcaagtgattctcctgcctcagcctcccaagtagctgggaccacaagcacccgccaccacgcccggctaatttttgtatttttagtacagacaggtttcaccatgttggccaggctggcctcgaactcctggcctcaagtgatccacctgccttggcctcccaaagtgctgggattacaagcacgtgccaccatgccagctaatttttgtatttttagtagagatggggtttcaccatgttggccaggatggtttcgaactcctgacctcaagtgatccacccattttggcctcccagagtgctgggactataggcatgagccacctttgagagacagtagagcatttcgttaaaggtatgaacttttttgtcagcctgtcaaggttatcccttgcttctgacactagatggtgacttgagcaagttaagttacctctgtgtgcctcggtttccccatctataaaatgggctaataacagtagctaccttgtattgtagggctggtgtaaggatgacatgagttaatatgtgtcaagtgctgagagcagcttctggacacagtgagtgctgtgcaaataaaggtgagccttattaggtgcctgttgtatgtggggcattatggatacagccatggagatgaaccagttccagtccttgccctcgatggggggcagtgtgggaaggggaatacagaagagagggtggccagtactgcgtaggggactgtctggggcctgcgggagtccagaggagcccatctttacttctgcctgggtcagtaggggaaggagcctccagagtttgcagtgatgaggctctgcaccacagatggtgccattgtccttgccagctttgcccagggctctggaggcagcagaaggggtcagaggttaaacagcacatcagtgctggtggttggggcgagcctggggcctgctttggaagccccacccagcaggttccccttgggttcttgggtcctccagggggctaagaactcctagaggcgtcgcccacagcttcatttcagccatcaactttcttgacggattgctgcctgccaggtacggttcctgctctcagagagtgcgtgcacagataatgtggcctccacacagtttactgaaatggttccaacctgctgagaccaggaaactcctaaaccccaccttcaccttcccagcctgggcaggcacccttcccactcttgattcgggtgagggaggccaggacgcagcggccaggccaagagtttcctctctctccaaacggtctggggggcatgtgccctgccccttccccacacatagtctgggagagggaggtgggcaaggaaacacaccaggctgggcgccaaggctcacgcctgtattcccagcattctgggaggccaaggcaggaggatctcatgagcccaggagtttgagaacagcctgggcaacaaaaaattagccgggcatggtggtacacacctgtggtcccagctactcaggaggctgaggtgagaggatcacgtgagcccaggaggtcaaggctgtagtgagccgtgttcatgatcgcaggactgcactccagccagggtgaccgcaaggccctgtcttaaaaacaaacaaacagacaaacaaaaagtaaatacacaagccccttctgagcaactggcctgaggctggcgcaggaacctaaggcacctccaagaggatcagaaagtcgaatactcccagggagctgggccccgcttccttttccttcaggtccactatatccatctctctctctcttttcttccttccttccttcctttcttcttccttcttcttttcttcttccttccttccctccctccctccttctcttctttctttctccctttccgttcctttccctttcgttttccctttccctttccttttccctttccctttttctttttcttttttttttttcattttcttgacagagtctcactctgtcgcccaggctggagtgcagtggtgagatcgtggctcaatgcaacctctgcctcccgggttcaaacgattctcctgcctcaggatcccgagtagctgggattacaggcgcccaccaccacgcctggctaatttttatgtatttttactagagatggggtttcaccatgttggccaagctggtctcaaacgcctgacctcaaataatctgcctgcctcggcctcccaaagtgctgggacttcaggtgggagccaccgcacccagcccactgcatttttctttgtagctgccattgtcccgtggcggctgttgctgcccgggaacgtacttcagggctgggtgggttttaccttgtctgagttgtagctaaggatgcagctccaacacttgcttcggccctggaatcttcaggatccctgcagtctcaacaattggctcatggagccggcacgggattgctgggaggcaggagggatttcttggtgggaagtgaggatcgaccagttgctaaattcggactcaaggcgtgatcttgctaaaacggactcgctctcctccatcctgtccacctccccaccacattaatgaccctgaaaccctttaatgcttccctagtgccaaaggcaacatgtcccaaagtcaccttctttctttctttttttttttttgagacagaatctcactctgtcacccaggctggagtgcactgatgtgatcttggctcactgcaacctccgcctcccggcttcaagagattctgctacctcagcctcctgagtagctgggattacaggcgtgcaccactacgctaggctaatttttgtagttttagtagagagggggtttcgctgtattggccaggctgttttcaaactcctgacctcaagtgatccgcccgcctcggcctcccaaagtgctgggattacaggcatgagccaccaggcccggcctcaaactcactttctggcaatggcagttctgagaaaaaaaggttctatggccaacgaagtttgagaaacattgcagagttttctgactagctcccatacccttccttggagaatcaaagagtaagtaaccacatcaaaggttctgagaagccccgtgatctaaaatggaaacctctcgaatggactccagtgattatttgtgtttgtttgtttgtttatttatttatgagacagggtctcactctgttgcccaggctggagtgcagtgttgcaatcatagctcactgtaacctcgaattcttgggctcaaacaatcctcccaccttagttccttgagtagctgggactacaggcacatgccaccatgcccagctaattaaaaaaaaattttgttaggccgggcacagtggctcatgcctgtaatcccagcactttgggaggccgaggcaggtggatcacttgaggttacgagtttgagacatggtgcaacccaatctctactaaaaatacaaagcttagccaggtgtggtggcacatgcctgtaatcccagctactcgggaggctgaggcaggagaatcgcttgaacctgggaggcagaggttatagtgagccgagattgcaccactacactccagcctgggcgacagagtgagactctgccaaaaaaaaaatttttttttttttttaaagagacagggtcttgctatgttgcccaggctggtcttgaactcctgggcttaagcaatcctcccaccttggcttcccaaagagctgggattacgggtgtgaaccgctgcgcctgtccgtgttctgcctatcatctgttaccatccggtagccccagcatttgatgaaacgctgtttgggaaatgacagtgaagagcttccatactcatctctttttctgactccctgactctctcttctgcctccctcttgcatttttaagttcccttaaattgcactgggctcccctggataatccagaagaatctcccatctgaaagtcagcgggttcacaacctcgatgccatctaccaccctgattcccctttgccatgtaaggagacgtatatgagcacatatgtgaatatatcaccctaggtcctggggacccagtgaggatggtatgattcttgctaactgacagagcaggagcgtcaccatcttggacaagcatcgccgttttaaattctccttgattaaaaaccgcctaaatccagccccaaaacatcagcctaacggctaacgtcagcatgaccataaaccacaaatgacacctccaaccagaaacattccaacacccccatccgactggagacatgccagccctgagataacctcccctctgaccagagacattcccagcatacagtaaaactctcctccacacagaaacattcctagcctgcgaaaagctcccatcccagaacccttaaatacccttagtccataaaaacaatgctgctgaacgaaattggccagaaggccttcttggttttattcttttttttttctttttcttttttttttttttgagatggggtttcactcatcttgcccaggctggagtgcagtggcgtgatctcggctcaccacaacctctgcctcccgggttcaagcgattcttctgcctcagcctcccgagtagctggaattacaggcataagccaccatgcccggctaattttgtatttttagtagagatggggttttaccatgttggtcaggctggtctcaaactcccgacctcaggtgatccacttgccttggcctcccaaagtgctgggattacaagcgtgagctaccgtgcccggcctcagttttattctccaaaataaacctgtctttggtaagccgcttttcatatttttttcttctttcttcaactcttacacaaaaatcatttcaaggtgcttgcctgtccctgagttccttccagccagggactccaggctccaccctctatgctgtttccgtgtccactgtctttgggttttatctccaaccctggggccaggcagcatggggccctgcacactctttctcagctgtgcaggaactggggaaaactcaactcggcacctgcttgcagtgggacaactgtgagaggtgctgcctgtggccagggatggagcctgtggccagggatgggtgtgtttaaagaggtggaggaggaggactttagtttcaggtagtctcttggtctggagctcaagtgagcactgagtgtggagagaggggttcagagtcctacagttaggaggtgactactgagttcggcgtgtggtggtatagtctagtggttgcttaggagcgagggtgtggcggtagacgcatagtcccctaaaacgtccatacattctacattgttaatttgggacagggtctcaccctgtcacccaggctggagtgcagtggcccaaccacggctgaagagattctcccatctcagcctcccgagtcgctgggactacaggtgcattccaccacaaccagctaatttttgtatcttttgtagagacgggtttttctcctttgccgtgttgcccgggctggtctcaaactcctgagctcaagtgatcctcctgcctcagcctcccaaagagctgggattataagtgcgagccacttcgcctggccaaatgtccacacattctaatccttgaaacctgatactatggatcttgagacaggaagatgatcctggattatcagggcgggcccaatctaatcacaggagtccttaaaagcagagaacccttcctggctgtgttagagagagatgatagaggcaaagagagagatgtgatgtgagaaggactcagcccaccattgccggctttgcagatggagtaagggggccatgagccaaaggatgccacagtccctagaagcagggaacagcccttagttggctgtcagcaaagaaacaagacctcagtcctacaaccacaaggaactgaattctgccaacaaccttagtgagcagggaaaccaacagtcccttaaagcttccgctaggcacacagcacatgacctggatgggggtgatcagagagggcttcccagaggaagtggcactcatgagtgaggtctcaaggatgaatgggggtacactggatttagggaccagtgcaggcagggaaacagcacgcacaggctgctgcagggagtggggtgcccgtggggtgccagtggcaaaaagaggctggtaggagagagtaccaggggcttcacaggcaggcaaggagggcagggcttcttgggccactgttaagactttggttttttttttttttaaatatggaccgtttcatgaatttccgtatcatccttatgcaggggccatgctaatttctgtattgctccaattttagtatatgtgctatcgaagcgaacacaagactttgggctttattcatagctgggttggaagccatctgagggtcttcaataggatggaggggaagacagtagatcgtgttttcaaaagatcagtctggtgtctgcactgtgagctgggcgtggtggatggggtagacgagaggagaccctcgggtggtcactgtcaagtccagatggcgggaaggtgaggaagagctggtagatgtgggggtaaaactgcaggttaaacagacagaactagtgataggttgggggccagggagaagcaagcatttcaaaaagcagtcagtctcggccaggcatggtggctcatgcctgtaatcccagcactttgggaggctgaggtgggtggctcatttgaggtcaggagttcgagaccagcctggtcaacatggtgaaaccctgcctctactaaaaatataaaaattagccaggtgtggtgccaagcgcctgcagtcccagctacttgggaggctgaggcaggagaattgcttgaacgcgagaggtagaggttgcagtgagccgagatcgcaccactgcactccagcttgggcgacggagcgagtactctgtcttaaaaaacaaaaacaaaaaaaccctcagtctcatggggagtggggagcagggatctcagagccctgaactacagcacccccccaccccaggcagcagaagctggcggatcagagcacgtgccaaatcctggccctaacactgaccagctgtgtgactttgggcagatttctcgtccttacgtctcagtctcccccatctgtaaaatgggctgacagttgttggctattagaattactttcgctatggaaagcaaaccgttccagcatttgcacttctttctgctcagcttctgctaggtcagcgcatctcaaactccctggggctcttgttaaaatgcagattccaattagggaggtctggggttctgcattttgagaaagttccaaggtggtgcccctgctgctggcccggggcctcaccttgaataacagagcgcacagcggtggagatccccaggagacagggaggggaggggtgcttacctcgctggccctgctcagctctggccccttcggggattttgcatttgatctaactccccgctcaccccacaacttctagactcgtctcccacaggtatggtccggctgagaccaggtggggctttttgaaagtgaactttaactggtcttgtagggaaaaccaaaccaacctgaaaatagacagacctgaaaatggtaaggttttaggccaccctctctttatcttgatgccactaaggtggggcggagggcctccggttgcacagctcattaccttgtggacacctcactttgccttgaacctgcggggaactccacccaaaagccccccctccagtccttgggcttccccctcccactcttcgctttctgatccctccttccctcccaggcaagggcccgagcacatcccagctcccctctctctcttccccagggcagcaggagctgatgagccaggcagggtgggcctggaaattcacagggccagacttctccgggcagcggcagacgccccggcccttgcctccttctccaccgggagctgggacaggtgaagggcctgtgtaaggggaagggggtgccccttcctcgctcagctccacatggaaaatggggccctaagtcctctgctcctccttccaaggggatttgagaggcacaggctggccatcccaccaggttgagatcccacagcccctccgcacagcaagaagactgccctccggtggcaagctatggatttaccgagaattattgctgaaaagaagccaccacctcccagcatttcgtgtccttgagatgctatttacatatgtggctttgtacatctgtgttctcactctctttacatatacttatcactactttatttttatcactactttattttttaattctctatttttttttttttttttgaggcagggtctcactctgttgctcatgctggagtgcaatggcgtgatctcggctcactgcaacctccgcctcctgggttcaagggattctcccgcctcagcctcctgagtagttgggattacaggcatgcaccaccatgcccggcttatttttgtatttttagcagagacggggttttgctacgttggccaggctggtcttgaactcctgacctcaggtgatctgctggcctcagcctcccagagtgctgagattacaggcatgagccaccgtgcccagccaagatgatcccagttttgttggcaacatccaaagcattgtaatcaggagccagtggaacatatgccttcttctctccatccggccgaatcagggtgctgaccttggccacatccatgccatagagctttgtcacagcctgtttgctctggtacttgttggctttaacatccacagtgaatacaagtgtgttgttgtcttctatcttcttcatggcagactctgtggtcagtgggaacttgatagcagagtggtcgagcttgtttctcctgggaacgctctttcgaggatatttgggcttttaatacctatttttatttatttttttgagatggagtttcacccttgttgcctaggctggagtgcaatggtgcgttcttggctcactgcagcctccacctcccagattcaagcgattctcatgcctcagcctcctgagtagctgggattacaggcacccaccaccactcctggctaattttttcgtatttttagtagagacggggtttcgccatgttggccaggctggtctcaaactcctggcctcagctgaccctcctgtctcattctcccaaagtgctgggactacaggcgtgagccaccgtgcccggccctgggatttttttattttaaagatgggtagcctgtggcccagagatgggggagaattggggacacggtgaagctcaaacctctctgcacttagttgctgtgtgaccttgggcaagtggctacacctctctgggctgcagtttcctcatctgtaacatggggtagtgatctggccccaaagagctagcagtgtgtaaaggaggagttgtgtgaaagcaggcacccaaggccagactcgggggagtaatgtgcaataccatgggctccccattctctgcaccccctacccctccattgacccaggtgtgatggcaggagggaagcataagcagccagagccccccaggtgtgccccaggccccagcagagtgagcagggcctgggcccatggtccccatagactccgtagctgtcagtgagattagcaggcaggccgggaggggagaccaaggacaaggacccagaatgttcccacactcagcaggccttgccagtgagccctcacacctccagccagccccaggcccaggctactgaactcacccagtgagatgctgtgggttaggagcacttcgggtgtcctggcaggttcctgcccccctggagaggctcccaggagccctctgggtgacttaagagaggacactctcctctcctactggagggaggagggtgtcctcaaggcccggggctctggattaaataagaagggagacaactcaagcgccatgtgactattgggcaaatatcacgttcatgtattatttcaaattaatatggtgacatgtttcagacatgcaaaaaaaaaaaagaatgatgtaaccaacaccccatttatccaccttccagccacgctgctgctttctgctgcttcctgaacatgccggaagcttcactgctccctcgagtggagagaagagtcaggcagccctttaggccagccaggcctctctcctggggaaaagtggcttctgcttccttccctaaaccaagaaagccccacatcgcaccaggggccacctcctttctgccaggcaccatcttggatgctgaagacatggaaatgctacaaggcttcctccctgcctcttgcctcacttcctgcttcccttctcttgcctcacttcctgcttcccttctcttgcctcacttcctgcttcccttctcttgcctcccttcctgcttcccttcttttcccttttgctccaccctagaagtttcacatcctggatcaccccagaaaagtgcaatggcgttcccctgtcattccatctggaaagacaaaactccttccctggaatctcaacaaagaatttcctctcttgaatcctttcttatgatggtgcttcactttcaaagaacccttgaaacacatggggggcttggtaaaaacatatcttcctgaggccgggccaggtggctcacgcctgtaatcccagcattgtgggaggctgaggcaggaggattacttgacctcaggagtttgagatcaacttgggcaacatagcaagacccagtctctacaaaaaaataaaacattagatgggtgtgggggtgcatgcctgtggccccagctacttgggaggctgaggcgaaagagaggactatttcagcctgggaggctgaggctgcagtgagccatgattgcaccattgcactctagcctgggcaacagagtgagaccctgtctcaaaaaaaaaaaaaacaaaaacaaaacaaaaaaaacccccacaaaaacccacaaaacaaaaaccacgccttcctgaaaagagtgagcctctccgacccctacttcacaccatgtacaagaatgaaacttgaatatgaacgattaaacaatctcatctaggagttaatgtaggagaatatctaagtgacactgagtgggcaaatatttcttaaacaggacaaaaaaaggcattaaccataaaagaaaagattagtatatgtaatttattaaagctaagaatgtctgttcatcaaaagcctccaaaaagaaagtgaaaaggcaagccagaggatgcgagaagatacttgcagtacatataatcaacaaaagccgtgtatctagaatatgtaaagaaccctacacatcaataagaaaagccagacaacccaattaaaaaaaaatggccacaagacctgaataggcatcttacaaaaaagaatgcctaaatggttaataaatgtgggaaaaggtgcccaacaacattacttatcagagaaatgcaaataaaaaccacaatgaggtatcactacagatccaacaagatggctaaacttttaaaaactgataccaccaagtgctgacaaggatgtggagcaattggaatcctcagacactgcagggaagtgcctactagtacgactactttagaagcctggatggagaatctatcagaactgaacatgccttatgccccagcagttccactcctaggtatatagccaacaaaagcgtgtacgtttggacactaaaacgtgtgtacaggaatgttcccagcagcactatcataataaccaaaaagtggaatgtctatcgagagcaggcccggagtggtggctcatacctgtaatcccagcactttgggaggccaaggcgggtggatcatttgaggtcaggaattcaagaccagcctgaccaacatggtgaaactctctctgctaaaaatacaaaaactagctgggcatggtggcacacacctgtagtctcagttacttggcaggctgaggcacaagaatcatttaagcccaggaggtggaggctgcagtgagttgagattgcaccactgcactccaacctgggcaatagagcaagactctgtctcaacaaattaaaaaaaagagagtagactagacaaataaattgtgcatatttgtgtgatgctatactgcaaagcaatggacagaaatgagcaactgttatttgcaacagtgcgaatgattctcacaatataatgctgaattaaagaggccgattgcaggggaatggactgcgtaattctactttatgtaaaatccaaaagcagtcaacactaatagagcgatagaaatcagccttttgggaggagtgtgtgggaggggggatgacggaggagctggggctggcaaggtcccatttgatgagttgggtgctgattgcctggtgcgttcatcttgtaaaaatgcagttggctgtaacttgagatctgtgcacttttttgtacgggtgtgttagacttcaacaaatacgtttaccagaaatttgtattgttgggcccatcccagagacaaggtaggaagcaattatgttaatcccagggcaaggggatggtgactagccccaggtgaaggtggtgatgattatggtatgaaaagggccaggagaatttgctgataggttgtttgagaggagagagtcaagggagacgctaaagtttctggcctgagctggagtagcagggggaagcgtaagggcggtgtgggtttgtggaatcaggagttctcgtcctgatttctctcctatattacaaagctccgtctcaggcctcctgggactggtggggacagagggagtatggatatctgggatccacctggcctcaccagcttttctgacctgccaggatcgacccttcgaggacacctgtcatggaaaccccagccactactatgacaaggctgtcaggaggtgctgttaccgctgccccatgggtgagtgggggcgttgggggtggggagaaggggggaaatttgtcctcaattgatgaccctcttgggggattgatgagtggggaaattggagccaaccgtcatcgtcataattggctacagttttctgcaggtcattcctagtgtcgcggagtccaaggactctctcggaaggctagggctgtagaattgagactgtgtttcttgctgccaccagaatgtccatctccatgagtttttatttttaacgtagagctgccctttattggacacttactatccatgagtccgagacctttatatgcacggcatcatctcattaagtgcttgcaatgatcctttattacactcaatttgcagatgaggctactggggcttggcagggttaagttccagctacttcccttgatgaccagggtcacacagttgggaaatggtggaatgatcagggctggggcccagggctcagagacctcaaagcctgggctgtcaacatcctctgaccacccttcatttctggggcccagaagtcctttgcagttctttcttttctctcttatttttatttttattttttttgagatggagttttgctcttgttgcccaggctggagtgcaatggtgcaatctcggctcactgcaacctccacctcccgggttcaagcgattctcctgactcagcttcccaagtagctgggattaccggcatgcaccaccacacctggctaattttgtatttttagtagagacagggtttcgccatattggccaggctggtctcaaactcctgacctcaggtgatccacccgcctcagcctcccaaagtgctgggattacaggcatgaaccaacgtgcccggcctaatttttttatattaatttaaaatagagacaaagtctcgctatattgcacaggctggtcttgagctcctgggctcaattagtcctcctgcctcagcctcccaaagcactgggattacaggcatgagcctccatgcctggcctctttgccgttcttgactgccccagctcaggacaggtgtttatcctgggacaacctggacaatagatttctctgagaccagtctcccagaccagagctccctttctggaatgttcccccacccccagcaccgtgattgacttctagtcaattaccaggaaatccttctggagctggggtgagtgttgttccttccattttgtagatgatgcttaggcccgaggagataagcagctggaatagggtcatgaggcatttctgcccctgtggttattatcaaaagtcccaaggcaccaccagtggtcttagatgggcggggcaggacataacgatgccctcgtggtctctgacctccaggaacagagattgtcacggggacatcagcctttagctgtgccagcaagggtgggagggagtctgtgtgtgtctggttcatcatcgccacttcttgctttgaggacagcaggccattgcaagtgggcgggcatcgtctggagggcttccgacagtgggggcggaggggcccatccacccagctgtactgtctggagggtggtgacaggttatggccatcagggctattccactggagctgcgcgggaacccaggtcagtcagttcctagacttgtggcctcaactcccccatgagatgcagaccaggctcgtgctcaggccaccaaaggacagagggaaacattcttggaaagaatttgatgtttttgtatttgattttgatttgtatttccaacaatgattcaaagtattcattgtatgggcaaaagtagtgggttggatgctattggactttcttgcttttatttttggtttagtgttgattttgaatgatctattaggtgggtcccctggttttttcagtgcttcactggtcggccatccacccacccatccaagtacctgcccccctcacccacccacccatccaagtacctgcccacccacccatctttttaaccactcaccaacccacccctcccatcccctttccatttttcttcccatctagccactatccatccatccatctgtattagtttgctggggctgccataacaaaatactgtagtctgggtgacctaaacaatagacatttatttcttacagttctggaggcttgaaggtccaagatcaaggtttttggaggatttggtttctggtgagggctgtcttcttggcttgcagatggcagtcttctcatggtgggaagatcgatctctctctctctttctctctctttccccctcttcatatatgccaccaatccccctggattagggccccatccttatgacctcatttaaccttaattatctcctaaaagtcctatctccaaatacagtcacactggggttagggtttcaacacatttaacatatgaactttgtgggggacacaattcagtccatagcaccatcgccttcccatatccctccaattatcctcccattcaccgcccccatccatacacccacccctctcctggccattttctcatctacctttctatccatccatccatccatccatccatccatccatccatccatccatccatcatccatccaacaaatttttatttctctctctctctcttttttttttttttttttttgagatagagtctgtctctgtagtccaggctggagtacggtggtgtgatcttggctcactggaacctccgcctcctaggttcaagcaattctcttgcctcagcctcctgagtagctgggattacaggcatgtgccaccacacccagctagtttttgtatttttagtagagatggggtttcaccgtgttggccaggctggtcttcaactcctgacctccagtggtctgcccgccttggcctcataaagtgctgggattacaggcatgagccactgtgccaggcctagtttctgggcctttggacatgcctgtccccatgtgggatgccctcccctccgtccctacctgctgcaattctggaaccccttcctccatgaggccttcccttgctagcctgatggttggtggtggttcccactcagttctctcagggcccgcttgctgtggtttttatcctctggaatggagtggcccacagtgttctatgacttttcatgggacccacaatcccagccacaaggagaaagacacttccttctcatcctcttctggcccctttgactccagcctgaaagggccttgatggggagtgggtggagagaaaaatgacatctcaggtcccaggctccctccacttaaaagctgtgacttaggaagagggggctccctcctccccacttcccctctctaaggcccagtgctggctggggctgaatactccatattggtgtggtgggtggggcattttactggtgttttattgaccttgtgcttccgtgtagccagagaagaaaaaagaaaaacccacaaaaaccccttctttgatctctcggggaaatttcttgacattttgcctgccctgtgcagccagcactcagctgtgtggccgggtttgcttgtgggcgggttggtggaggaaggaagctgagggacctttgagattgaaaaatgtagatgtcatcgaatccctccttgcacccaggcctgtgatgccctctccagcattcctgagagcaggtccccagccctttgcttacatactcttggtgacggggagctcattcactgactcataacaatgaccacgattcataccgatggagcacgctatgtgctggccactgtgctgggccctttaccgaccttaagttccttcaatcctgataagaaatccagagaggaaacttggacaccgaggggttcaggaatttgcacaaggccacatgcgtatcagtggctcagccgggccgtgaacatgaccaccgagtgcagtctcctgagctcttcaactgtagttgatactgaccctcaaggcctcgaatttgggaggcagaagagtttacgagtgaagagctaatgcgggggctacaaagcccttcctgttctccatcttcctggactaccctctctttgtgtgcagactcgctccccacaggaaggggtctctcctgcagatgtttgaggcctgcccaggttcaggggaaggatgtgaggccaggccaagtgttaggtagggagcatggcaggtgtatcccatcttgtcccaggagctgagggttcctccgaaggctgtgaacaggaaggaggaggaggagggggtttgtgggttcccccagcttccgctgcccttgggtaaagctcagctttgtgcatgggcacgcccatttggcatgacagctgctgcccctgccgcctccccctcccccgcccagtccctcttcatcctgggcttcagctgagtgtgctgggctcccctgtgccctctgacactgtcccagcagagccccctcacagcacctcctggccccccactgtccctgtgtgcttgactcacacctctgcattcctcagggtccacttaagtgtaggccctccctgaccccagcctgggccacagagcgagattctatctcgaaaaaaaagagaaataaacatttgttggatggatggagggatggccctccctgaccccaagccagctcagaggtcttggctctgggctcttggtgcctcccatggttccactttcctaacactccttccatgtgtcatgacttgtctatcgtcttcctgcaggatccccagccctgaccccagggcttggcacatagtagagtctcaatttttgaaagaataggtgaatgaatgaatatggctaacttgccccgcatactcttctgtgacagccagccattgcctcacagggccaagcttccattgtccccctggcacctccctctgctgaagtcagaccagcctctctctcctgtccatcccactcgcaggtacatcctagtcttttctttaagcctgaaaaatccaccagggttcttttgtataggaggaagtatgtgggcgtggaagggaggaaatggaaggcagtagaaggaaataggactggcccaatgcagcaagcatttattgagctctgttggatatagggttatttgggggagagaaggacaaggtcctgcctcctgggagcaacccactagtaggggaggtgacatgcttatatatatctgatactccagagggtatctgtgctaagatagtttcaaaggaggaagaatgggagcttacagtgaggaaaagcccctataccactggtctgcatccacccatccatccatccgttcatctacacatccatctacccatccacccatctacccactcatccactcttccctaacccatccatctatccacctatctacctgcccatccacccttccccatccatccatccatccatccatctacccatccacccatctacccactcacctactgttccctaacccattcatctatctacccatctacccacccatccacctttccccatccatctatctacccatccatctacccatccatccatctacccactcatccactcttccctaacccatccatctatccacccatctatccacccatccacctttccccatccatctatctacccatccaaccatctacccactcatccactcttccctaacccatccatctatccacccatctatccacccatccacctttccccatccatctatctacccatccaaccatctacccactcatccactcttccctaacccatccatctatccacccatccacctttccccatccatccatccatccatccacccatccgtctacccatccacccatctactcactcatccactgttcctccacccatccatccatctacccatctacccacccatccacccttcccccatccatccatccatccacccacccactcatccatccacgtacccactcatccatccacccacccactcatccatccacccacccactcatccacctactcgtttatccattcacctatgcactcactcatccatccatccacccacccacccactcatccatttacccacccatccacccactcattcattcattgattcacccaatatgttttgtgtatttgcattctatcagaccctagagattcaaccatgggggggcagctatcatcttgccctcacaaactcaatctcaataagacaaatattataccaatttgagacttttctacctgcttgtaagaaaagggggtgccatagtttgaattcccccagaagtagactgttatgggctgagtcatgcccgtatcccccaaccaattcctatgttgaagtcttaaccccagaatctcagagtgtgaccttattcggagatggggtctttaaaaaggcaattgagttaaaataagttcactaggataggcccaaatccaatatgactggtgcctttataaaaggaaattaggacacagatatacacagagacaagactgtgggaggacatggggaacacagtccatctgtaagtcagagagaaagagctcagaagaaactagccctgcccataccttgattttggacttctggcttcaagagctgacaattaatttctgttgtttaagccaccctgctgtctgtcgtagtttgttatggcagcctgagcagactgatgcacagactttgaggcaatgatctgagtacagttggtgatgcctggaaacaccaatttggaagtagggaagtggcagacggaagggaaggcagcttataaagttgtgttagaaagctagttactgctgtgggcaactggggcttaatccctctgggggcctctgggagccagtgcagaacagctgagggtgagggagctggggtatttatatgccaatgtccatcaaacattggtggaactgctcctggggtggtacatcttggtaggtctggcctgccacaccctggcagagcaggctctgggtgctctgagagggtgattttaaagggacccagagagaggatctgggtggggtcagatgatcaggaaagttccatgagaagatggtatttcagcctgatctggctgggtgtgaagggttcccagtgggtggaagatggagaagccacttagcctgcaggaagaacatttgtgttagtttgctggggctgctgtaacaaagtacctcaggctgagtggcttaaaccagtggtccccaacctttttggcaccagggactggttttgtggaagatgattcttcccatgaaggggggtcagggatggttttgagatgaaactgttccatctcagatcatcaggcattagagtctcatgaggagcatgcaacctagatcccttgcacgtgcagttcacaatagggtttgcgctcctatgagaatctaatgcagttactgatctgataggaggtggggctcaggaggtaatgctcgctcaccgtcactcacctcctgctgtgtggccccgttcctaacaggccatggactggtactggtccccggctggggactggggtcgcctggcttgtggcagcataactccaatcttcacatggcattctccctgtgtgcacatctgtctctgtgtccaaatttccccttttcttatttattttatttcatctgtactgtattgtattgtttcagagacagggttttgctctgtcacccaggctggagtgcagtggcatgatcatagcccactgcaacctctaactcctgggctgaagtgatcctcccacctcagcctttctgagtagctaggagtacaatgtgacatcacacctggctaattttctattgttgtagatggggtcttgccttgttgcccaggctagtctcaaactcctggcctcaagtgatccttccatttcagcctcctaaagtgttgggattacaggcatgagttaccgtgcctgaaaatgtccaattttccccttttcttttatttttcttgtcttttttttttttttttgagacagagtctcactctgtaacccaggctggattgcagtggcgtgatctctgctcactgcaagctccgcctcccgggttcacgccattctcctgcctcagcctcccaagtagctgggactacaggcgcccgccaccacacccggctaatttttttgtatttttaggagagacagggtttcaccatgttagcgaggatggtctcgatctcctgacctcgtgatccgcctgcctcgacctcccaaagtgctgggattataggtgtgagccaccgcgcccgacctctttttattttttttgagacagagtttccctctgttgcccaggctggagtgcagtggtgtaatctcagctcactgcaacctccacctcccaggttcaagtgattttcctgccccagcctcccgagtagctgggattacaggcacatgccaccatgccctgctaatttttgtatttttagtagagacggggtttcgctatgttggccagggtggtcttgaactcctgacctcaggtgatctgcccgcctcggcctcccaaaatgctgggattgcaagcgtgagccaccgcaccggccaagtttccccttttcatgagaacaccagtcagattagattaggcccaccctagcggcttcattttaactggattgcctcttcagagcccctacctccaaataaagtcacatcctgaggtactgggggttaggactccagcatatatatttttttggggagacacaatttaatccataccaacattcaggatgtatgaggggtgttagagaaaagatcaagatacccagactggctgtagtagagagtgcatgaagtgagcaatgtactagaatgccagactgggaagatggagacacagtgtgaggcctgggagtgcaggctggggaatgccgtatgaactaggttgacagaacatgttttaatgaaatatgtgtgaggccctatgataggggaggcattggtgagtggacatagaaagactcatcctcaaggagctgacttttttttttccttgagacagggtcttgcttcgttgtccaggctggggtgcagtggcgctatgcccgctcactgcaacctctgcctcctgggttcaagtgattctcctgcctcagcctcccaggtagctgggattacaggtgtgcaccaccacgcctggctaatttttgcattttcagtagagatgaggtttcaccatgttggtcaggctggtctcaaactcctgacctcaaatgatccgcctgggctgggtgcggtggctcacgcctgtaatcccagcactttggaaggccaaggcgggacggatcatgaggtcaggagatcgagagcatcttggctaacacggtgaaaccccgtctctactaaaaatacaaacaattaaccggtcatggtggtgattgcctgtaatctcagctgaggcaggagaatcacttgaacctgagaggcggaggttgcagtgagctgagatcctgccactgcactccagcctgagcaacagagcaagactttgtctcaaaaaaaaaaaaaaaaaaaaaaatccgcccacctcagcctcccaaagtgctgggattataggcgtgagccaccgcacccgatggagctgacattcttatggggaatttagacactgtgaagattgagctcacaaataaatgtgtgattacaacagttaggtgttgaagggcaaggaaatgagtctttgtttttattggggatcacgaccaaggctctgagacagtgatgctttgatcatgatgtgaaggctgagtgggagttactaggggagaggagcattcggggcagaggaccagcttgtgcaaaggccctggggtggcagaagggagcattgcccctttggggaacagggagatgccagtgtggctagagatcagagggcaagggggacataggtgagccgaacctcactagccatggtaaggacccatcctgggagccatgagaagcctttgaaagttttcagcaaggagtgaaggggtcagatttacctctcagactactggggaactactgaagtgtctgagttaaagagtgacagccatgaagctagtttttttttttttttttgctttttttttttgagacggagtctcactctatcgcccaggctggagtgcagtgacgcgatctcggctcactgcaacctccgcctaccaggttcaagcaattctcctgcctcagcctcctgagtagctgggattacaggagtgtaccaccatgcccggctaatttttgtatttttagtagagacggggtttcaccatgttggccaggctggtcttgaacttatgacctcaaatgatccatgcgcctcggcctccgaaagtgctgggattacaggtttgacccaccgcacccggctcgaagctagtatttttgagaggttcttgcgtgttgttctagggcagaggtgcttaccctggggtccatggactcaaaggtagatttcacagggttcatgaacctgaatggattcaattattttaattagcttctagctaaaattcacttatgaattccgcccattatgaattaaggcaacaaagcacagtggtaattgtagtacacggctttgtcctcagcggaaatcatagatattctcagattatattacagtagctgcagatgttgtgaaatgttgtctgggctcatcattgctttgaaactgtggagttattttaccctattatttaatgagtttacaaagaatcacatgttactgtatctttttttttttttttgagatggagtttcgctcctgttgcccaggctggagtgcaatggcacgatctcggctcactgcaacctccgcctcccgggttcaagtgattctcctgcctcagcctccccagtagctgggattacaggcgcctgccacgacacccagctaatttttgtatttttagtagagacggtgtttcaccacgttggccaggctggtcttgaacccctgaccttatgtgattcacccacctcggcctcccaaagtgttggggttacaggcgtgagccaccgcacccggcctgttactatatgttattttgtttaatgctttgataaccatattccaaggtagttggattcctctgcattcctgcatattttattcatgaattcatgattctgtgcagtgtccacaggcttccttagaatgattaggggcacaagaaatattgggaaccccctggtctattttcattgtaactggcagaagggctcaaataagacaaaagagaaataattggctccctaacagagaagtccatggacaccctacattcagatgtttgaacgatgtcctcaggagcccatttctctccaactctggcttctgctggcttctgagtcacctccttcttaggcaagtcctgcccacaccatgcccacgctcaggctgtgatgacctgggcagctctgggcttaactagccctttcagccaggaatccagtagataaacggaggacatctttctggattgcttttgtgaaactctcagagatgaggcttattggctggcatgcctgggtcatgtgcccatactaaactaatcacagtggtgaggaacatggagtactctgattggcctgcttgggtcatgtggcaatcctgagccaattatattgatgggaagaagtattctgattggcctgcttgggtcatgtgctcatcctggaagcaaggtaggcagcgattgctgggtgacttgtttatctcgaaatcaggctggattagggtcttagtggcaggagtgtccaatctttcggcttccctgggccacattggaagaagaagtgttagtgtggaagaagtgaatttagtctaacactaaggatagtgttttagcttatagctgatgagctaaaaaaaaaaaaaaaaaaatcacacacacgcaaatctcataatgttttaagaaagtttatgagtttgcgttgggcctcattcagagctgtcctgggccgaatgcggctagtcgtgggttggacaagcttggtctagactttcatggtctaaagttatggctctcctaattcctgcagtgagataagacccctgcagagaatgatgacaaccggtgctcatatagtgcttgttgggtgccagggactgctgtagtactttatacatatttatcttcacagtccattcagtcctttcaagaacactaggaggtgggtcctattactaacttaatagtgctaaatatatacacgtactatgtaccctcacacacacacacacacaaatagtgctgacaaggtcattatcacgcaattggcaaatggcagccctagaatcccaggcccagctcttctctataactatgttgcttttccttgcctgctaggggaccttaggcgagggttgcccctcctgggtgtcagtgcttccatccataacacaagaattggactgacagttttcgggggttggaggtggagctgggaggggcgtcagggatgagaggtgtggggcattgggtcataaggcctttgctaagtcagcctggcttggagcttctctgtttcttttcccagggctgttcccgacacagcagtgcccacagaggcctactgactgcaggaagcagtgtgagcctgactactacctggatgaggccgaccgctgtacagcctgcgtgacttgttctcgaggtaagggccttgttctctctccagggcctccttctagggagcatgaggggtcctcagaggagaggtgaagaatctggaaggtggagagcatcatgatttgatgtctgttctctgaattgtcctcctggtgcctcagtttacctctctgcatttgtgatttgatatcagccatgaccttttgcatccatactttcacagagacttaacatgtttcctgaaggagaggactcacatttttttgagtttaatcctcaccacagccctaggggaggatttcttgcttatccttactttacaatgaggaatttgaggatagggaggttaagggcctttccaaagttacaaaactctggtaagtggcagaactggagtttgagttgtggcctgacaccaagagctgtgttcttttcctaagatcacaggacttccaggaaaactgtttcagtatgaccttttattgttagtctcttattatggttagagaatgcagtctgtgtgctatctagtgtttatttttgtgtggatttttttggggggtagggtgggggaaatttgttgagatctttttgtggtctaataaataataaatgatcatgtattttcagagtgttcagtgtatgggtgttttaaaatgtgtattctgtttgttgcgtataaagttctctacatatctattaagttaagcttgttaattgtgttatttaaataatgtgtacccttatttacttttatcacctttatttctgagagatgtgttaaaatcttatctcccagtatacttgttcatctattagattttcattgtgttctttctatttttgcttcatatatgtcaaagctatgttattaggtacataaatgttcatgaatgttatgtttttttggtgggttgggctttttatccacatgaatatacctctccattccttgtaatgccttttcccttaatttcacatttgtttggcattaatattgctattccttcctggaagaagtagcaaaggttaaaaagaaagaaaagtaataataatactgccatttcttctttctttttattagcatttatctggtgtatctttgaatttctaaaagtaatgactgcattttatgaaatgaaaattataaacatttattatttaaaattcaagcaatacaaagagtgtaaggaagaaaacaaacattgccctccccagccctccatctatagataactactattatcattagatggctgacacgcctctacctctctgtataaagatgggtaggttagtaaccagacagcctgtacacacttacaaagaaggaattttaagagaatggcaacatatttatggcattaaaatgataatatttaattttagtcaaaagtatcagaaaaagaaagcgaagtgaaacagaagaatgccaaacctcagtcagattaatgtatcttcagcaaaagatactgcaattcctttaaaaaaaaaaaccctctaaaattaagaaaggaggttatgaaaatcagtaagtggttaataatcatttcagaatctactatctcttgcagtaaaggcaaaatctgcttagtttgagttttggacagtagagaatagattgactccctgtaatgaagaacaaagtaattatttttcccacctcctcatcctcttcctgacttttattccttacacaaattttactttgtcataatctataatgtttatattctcatctgcaaccataagtcccttggcatgttagccttaacattttttattattcatgatgagtttatttggcacagcttctctgttcctgagtttttcactttgattcatcatttgagtgattggattacactgtcaggtggatttttcaagaagggctcgtctttgcaatattctctgttatttcatgtttgaggatgcttgtctgttgcctatatttttgttttcttttttttctttttgagacagagtctgactctgtcgcccaggctggagtgcagtggtgcaatctcggctcactacaacctctacctcctggattcgagcgattctcctgcctcctgagtagctgagattacagggatgcaccaccacgcctggctaatttttgtatttttagaagagatggggtttcatcatgttgcccaggctggtctcaaactcctgacctcaagtgatccagccgccttggcctcctaaagtgttgggattacaggtgtgagtcaccattcccggcccaatttcttatctttaaattttaagacagggtctcactttgttgtccaggctggccttaaactccagggcttaagtgttcctcctgcctcagcctcccgagtagctggggctgcacttgcatgttactgcacccaacttacaatttttttgtgtgtctctgaggatataaattatagtcatgtattgcttattgacaggaatacattctgacaaacgtgtcattaggcaattttgtcgttgtgcaagcatcctagattagtgtacttacacacacctacatgatgtagcctactgcacacctaggttctatggcagatccttttgctcctaagctacaactctgcacagcatgtgactgtcctgaatactgtaggcagctgtgacacaatgtgagtatttgtgtatctaaacatagaaaaggtgcaataaaaatacgacataggccgggcacagtgactcacacctgtaatgccagcactttgggaggccgaggagggtggattacctgaggtcaggagttcgagaccagcctggctaacatggcgaaaccccatctctactaaaaatacaaaaattagctgggcgtggtggcacgtgtctgtagtcccagctactcaagaggctgaagcagaagaattgcttgaacctgggaggcggaggttgcagtgcgccgagatcatgccactgcactccagcctgggtgatagagtgagacaccatctaaaaaaaaaatatgatatgaaagataaaaaaaatggcacacttgtacagggcacttaccgtgaatggagcttgcaggacacgaagttgttctgggtgagtcaatgagtaagtggtgggtgagtgcgaaggcctggggcattactatgcactactgtggactttatcaacactgtacacttaggctatactaaatttataagacacatttttctttcttcaataataaattaaacaactttttcactttataaactttaactttttaaacttttggctcttttgtaataacacttagcttaaagcacaaacacatcgtacagctgtacaaaaatattttctttatagccttattcattacacttttttctactttaaaattttattattttattatttttaacatttttaaattaaaagctgagacgcaaacacctacattatccgaggcctacacagagtcaggatcatcagaatcaccgtcttcctcctccaaatcttgtcccattggcagcgtgcagtgactcacacctgtaatcccagcactttgggaagccgaggtgggcagatcacttgaggtcaagagttcaagaccagcttggccaacatggtgaaaccccatctctactaaaaatataaaaattagccgggcacgttggcatgcgcctgtaatcccagctactcaggtggctgaggcaggagaattgcttgaacccgggaggcggaggttgcagtgagctgagattgtgctactgcactccagcctgggtgacagaatgagactctgtctcaaaaaaaaaaaaaaaagaatcctgtcccattggaaggtcttcaggagcggtaaggtaacatgcatggagtatcgtctcctatgataacaatgccttcttctggatacctgcagaaggacctacctgaggctgtattacagttaacttttgttttaataagtaggagtacactctaaaataatgataaggccggcttggtggctgatgcctgcagtctcagcacttagggaggccaggctgggagaatcacttgaggccaggagtttgagaccagcctgggcaacacagtgagatccccatctctacacaagataaaatacattagctgggtgtggtggcatgcgcctgtagtcccagctactcaggaggctgaggtgggaggatggcttgagcccaggaagttgaggttacagtgagctgtgatcatgccactgcactccagcctgggcaacagagcaagaccctgtttcaaaaaaaaaaaatgataaaaagtatagtacagtaagtacgtaaaccagcaatatagctttctatgatcattatcaagtattacatactatccataattgcatgtgctatgcagcacttttatacaactggcagggcagtaggtttgtttataccaacatctccacaaacatgggagtaacgcacgtgctacgacattgccgtggctatgacatcactaggcaataggaatttttcagctccattataatctcttttattgttttttttgtttgagatggagtcctgctctgttgcccaggctggagtgcaatggcgcaatctcggctcactgcaacctgggttcaagcgattctcctgtcttagcctctcaagtagctgggattacaggcatgcgccaccatgcctggctaatttttgtattttttttaggagaggcgggatttcaccatgttggccaggctggttttgaactcctgacctcaggttatccgccctcctcggcctcccaaagtgctgggattacaggcgtgagccaccgcgcccggcttccattatgatcttgtgggaccatcatcatgtacgccatccattgttgactgaaatgttgctctgtggtgcgtgaaggtatcatttctaatgttttgttctgttttccctcttttctgcctccttgagtgttagtgctctttgcattcagagctcctcttccttggcgctggttttcctctgatgtttggcgacttctagttctgtgcacatcatatctcatgatgccggtggtctgcgaatggggcttctgaaacccacctctgagggcaatggggctcaggtggggctgcaacagtctctttgcgggaagacgcgtggcctctggctctgtggcatgagtgatgaggagctatccagagcctttcccccttcttcagagagtcccccttggctgcattctgggctgtggtctccttcactctgatcttatctgtcctctgccttccgtatttcggggagttgtcttcgtttctgatctgccaagcttgccccttcttggtctccaggcctgttacacattaattattagttttaccagtgctatttttgttttgttttgttttgtttgagacggagtctcgctcttttgcccaggctggagtgaagtggggccatctcaactcactgcaacctccacttctcgggttcaagtgattttcctgtctcagcctccccagtagcttggattacaggtgtgcaccaccacacctggctaatttttgtatttttagtagagacagggtttcactatgttggccgggctggtctcaaactcctgacctcaggtgatctgcccacctcggcctcccaaagtgctgggattacaagtgtgaaccaccactccccgcctagctgtactttttatgtctgttaaccaacctgtgatttcctgcttttcctgccagcagttgttattatctgtctttttgattcgagtcattctagtggttgtgaagtggtatctcactgtgattttgacttgcatttccctaatggctaacggtgtgggacatttttcatgtgtttattggccagctgtgtatcttctttagagaaatgtctattccagtcctttgtccattaaaaaaattaataaactatttctggctgggtgcagtggctcacgcctgtaatctcagcactttgggaggccgaggcgggtggatcacctgaggtcaggagtttgagaccatcctggccaacgtggtgaaaccccgtctctataaaaatacaaaaaattagttgggcgtggtggtgtgtgcctgtaatcccagctactcaggaggctgaggcaggagaatcacttgaacccaggttgcagtgagccgagattgcgccattgcactccaacctgggtgacagagtgagactctgtcttaaaaaaaaaaaaattaataaactatttcttagagcagttttaggtttacaggaaaattgaacagaaaatacagagttcctatataccctcaacccccttcccaatctcccacagtttcccctattttttgtttgaaacagggtatcactcttttgcccaggctggagtgcagtggtgcaatcacagctcactacagcctcaacctcctgggctcaagcgatcctcccgcctcagcctcccaagtagctgggactacaggcatgtgctaccatgcctggctaatttttgtattttttttttgtagagatgggatttcaccatgttgcccatgttttatagagatgggatttcactatgtcgccatatgagggcaaatgatcctcctgcctcggcctcccaaagtgctgggattaaaggcgtgagccactgcacccagcctcccctgtcacgaacaccttgcattagtgtggcacaattgttagcattgatgacctgataatgatgcattattattactaactgaagtccatagtttacagcagggttcactctttgtgttgcccattctagggctttagacaaacggatgatgaccacgtgcccaccatcaccgtggcatccagaatattttcactgccctaaatgtgtcctgagctcgtcggttcacctctccctccccctgaacctctggcagctactgatctttttactgtctcgatagtttcatcttttccagaaatgtcatgtagttggaatgacagtgtgtggccttttcagactggtgtctttcatttagcaatatgtatctaagtttcctccatgtcttttttttatttttttgcattttaaaaaattggtacattaatttaatttttaatccaattttagtggtcaccagggggttgagctgggaggcggaggctgcgttgcggactgcacctgccctctccccctcatctcaagagctatctggagagacgccttccttctgttcccctctgtgacccctgtctgtgtcccttagacgacctcgtggagaagacgccgtgtgcatggaactcctcccgtgtctgcgaatgtcgacccggcatgttctgttccacgtctgccgtcaactcctgtgcccgctgcttcttccattctgtctgtccggcagggatgattgtcaagttcccaggtcagtgtccccacccttaactcaggacagagatctatgctgttgctgctgcaccttccgcccaccccagtgcactgttgacttccgacctcccgcttcccggagactgttggacagatcatgtctcctttggcgatgggccagggatgtacccagcacccagcccttctgctgccctcccccaccttgtgttccaggtgcagagagaccctgctgtcccctggcatagacctggctggaggaggtcttgctttggtttgaggctcaaggcagaagttatctgatgccccataaacaagaagggaacctcaagtctctgtcctgggagtttcctagaagattggggttggcttccccctttcaggttcagggcattgggagttagaggtgctgagagatctggccccaggctcaagacttgagaaacttgggtttcttttccaacttaccgtgtgacctcagacaagtttcttacctctctgacttctacttctctgatagtacaaggtgtcagggctgcttttaaccagagaaggggtatgggccacagaacctgtctgggtggagttgggaccatcttccagaagggaggcatgaggagtgggtgggctttggagcacagcacagagtggctgccgcagttgcagactgtatggagccggggagatgggctcagaggcagccctgtgtccactgtccactgaggagaaaagtgccacaaagtgcctgtggtccctcccccaaccaggtccttctctggagtcccatgccctgttgtgcaaacctggggattggcagtcacccccatcgctaccactgcctgccccttttatccttccctcgttccctcatccttcacagccagcccatcctcgagtcctgtagatttggcctccaattatcttccccaccttctcaccccgaataccttctcttatacagcccccatggcagacagccagaatgacccttgcaagaccaaatctgaatctgatcctctctctctctctctctcactcactcactctctctctgtctcacacacacacacacacacacacacacacggatatatacctgaaatgcttcagtatcttcctgttactctaaagataaggacacaaggccaggtgtggtggcttacgcctgtaatcccagcactttgggaggccaaggcaggcagatcacttgaggtcaggagttcaagaccagcctggccaacatggtgaaacctcatctctactaaaaatacaaaaattagccagccctggcagcaggtgccctgtaattccatttactcaggaggctgaggcaggagaaccacttgaacctgggaggcggtggttgcagtgagctgagattgagccattgcactccagcctgggtgacaagagcaagactccgtctcaaaaaaaaaaaaaaaaaaagaaaactccagggactcaccacggtgtccttcaggtcccaaggcccccagttgacctgccttcttctcttcatgtttcagagccttcttacatttattttgtacataatgtccagggcttttagcggttcttggcgggaggatgaggggaaaacgtgtctaagccatcttcccagaatcagagtctcaggatgtgatcccaacacagccccctcctttctcccagcttcagctctcagcaccaagccctcactctctgggctccacctgcgctgcccttcttccaggttggaggacgtgtgtgcttctctgtcccacccgccctctgcacgtgctgttctctctgtcggagacacccttccctccccattcacttagtcaaatcctactcagccctgagctctccaccccacttcctcaagaggccttccctggcctctcactagggaagctggtagcactgtgtcctttgcaaatgtggatacatacctctctctgtctcttggcttgatcaatgtctgtctccctccctggctggaagcttcctgagggcaaagaccatgcccctggtgtccatcaacatctccccactgcctgatcaaatgctaggcatggcacctgctccccatagagattcattgaattaagatatggggacacctgacagggagctccgagctggtgggggggtggagttcaaatctggtcaaattccagggtcgggggagagcgctctgctaaggaatgatggaggcctccacccataagcaggggagagtgctggagtggactgggcagcagatacctaggattttgcaaagatttgcaactgtggggcatgttcccacccgcctctggacctcggtctccccatctctcaaatgaggaggtataactgaaggccttgggggcctctccaaaaaggccaaacttcccaaaagtttccagctcagaaacttctgcatctttgtgaaaaacatcttgagttcagttgttccagccaaggcttcctgctggagggactgtctgggcagtgttcctgagactgccacacagcggcgccagaggcctccctttgctgcccctggaccccagctgcccaatgcagtgcccctggcccgtggcacgtggccacgcacttaaaatgcagctaggggccgggtgcggtggctcacacctgtaattccagcattttgggaggctgaggcaggcggatcacttgaagtcaggagtttgagaccagcctggccaatgtggtgaaacctcgtctctactaaaaatacaaaagttggccaggtgtggtggcgggtgcttgaaatctcaactacttgggaggctgaggcatgagaattgcttgaatccgggaggtggaggttgcagtgagctgagattgtgccactgcactccaacctgggcaacagagttagactctgtttcaaaaaaaaaatccgataaaaaataaaaaaaatgcagatacgtctgcattgagaagtgctgtgtgtacaatatgcactggatttcgaaaacttagtataaacaagaatataattaattattttttatattgattgcctgcaaacatggtaatattttagatatactgggttaaataaatatactatgaaaattaattgcactgatttctttttaccttttaaagtgtggctcccagaatatttgagctggcctgtgtgactcgcatatctctgttggacagcactgttttagaagtgttctaatctcagctgccaaaccctggttaatctctggggtcccctgtggactcacccatggggcagctctccggggttgttgttttttttccagctgtaaaatagaaagcagtttctgcctccagtcagccaagccccacgctaagagccttcactggctgtctctcctgaaattctcacgtctccataagacagacagtattagccccattttccaggtgtggaaatcgaggtccggagatgggaggtaaattgcccgcggagacagagcaggaaatgtctaagcttaggtgtcatcactccaccatgccacagaacacgagaggtcagcattgctcgcgctcacctccacggaaagcttcagagcgaagtcccacacatacaggccaccatttttttattttttttttttttgtgatggagcctcgatctgtcacccagactagagtgcaatggtgtgatctcagctcactgcaacctctgcctcccggattcaagtgattctcctgcctcagcctcctgagtagctgggattacaggtacctgccaccatgcccggctaattttttgtaattttagtagagatggggtttcactatgttgtccaggctggtctcgaactcctgacctcatgatccgcccacctcggcctcccaaagtgttgggattacaggtgtgagccaccgtgcctggcgacatacgggtcaccttctaagtgttgggatgggagtccagatgggtgtaaggacatagcatttaccatatgtcatgcaatgtgatgggcacctcacgtgcactcttctgtttatcctgacgacagcctggtgaagagtgtatgattataatcatttgactgggctgggcacggcagcttatgcctgaaatcccagcactttgggaggctgaggagggtggatcacctgaggtcaggagttcgagaccagcctggccaacatggcgaaaccctgtctctactaaaaattagccgggcgtggttgcaggcacctgtaatcccagctactcaggaggctgaggcaggagaattgcttgaacctgggaggcagaggttgcagtgagctgagattgcatcactgcactccagcctgggcgacagagtaagactctgtctcaaataaataaataaacaagtaaataaaatggactttcctggcacagttaggacatagcaggcaaactgaggggcactggctagacgatgtgtgtgttttcttctccactctgcttctgtccagcattcttcaggactccttggattgcatgtagcaaaatccccaattttttagcacatgtagcttaaaagtctggggatagctctgagaagcttcaggcatggctggatccagggctccatcttgccccatctctcacctctatttccctctctgttggttcatcggcaagatacttacaagcagctctgcccagcgccagtgggaagacagcttccctttcttacatttttaatatccaaaaccaaaacctttaaatcccaaaccagaatctttaaattctacctcacaggcttgggtcacatgtccgtccctgaactggctcatcgtggccagaggaatgcaacggattgattggtccagcctggtctcatggccactcgggaaagggggttcagtcggtcccaacctctaaccacagatgctgagatcagagggagagtaattccccagggaaagataggctgctttactctgaaggggaacgggtgccaggcgggtgccacctccagatgactgctgtgttttccaagggccccatctccgactctggcctgtggtagtgaagggtgtattccgggagactttgggtccccaacactgattctgaaggcactgctgtcccccctgcaggcacggcgcagaagaacacggtctgtgagccggcttccccaggggtcagccctgcctgtgccagcccagagaactgcaaggaaccctccaggtgactccctggctttgcctcctcctcttcccccaagctggctttcagatgaggctgccccaccccacaggacgcccatggtacaactgggctgggggtgtaagcgggattcagcccatggtgtcagcactttggggtgcctctctgccaagcccctcagatcatttgaggccctagggtgtgcccagccctgccctgagcacatgggagacccacagggcttagaaaacacaggccttgctcccaggagcttacagtgggcccgccagaggcagtgggccaagggcctgggaccccatctctgtggaaactgttactcgtgagcacaggcctcccttgccccattggcagaattatcagtcccatctctggcttcttccccagtggcaccatcccccaggccaagcccaccccggtgtccccagcaacctccagtgccagcaccatgcctgtaagagggggcacccgcctcgcccaggaagctgcttctaaactgacgagggctcccgactctccctcctctgtgggaaggcctagttcagatccaggtaatttccccatgaagctgtgggtcgtctccctggggtgctcgattggtggatggcccatgagtgggggtgtttggagcaggcgggcagtgatctgtggtcttttcctggtggggagagaagacggtggtaaggtatgatctagggctgaaagcattgaggggcagaggtagacaccagagggctcattcatttgccagcagtgcagagggcctgccttgtgccggacacccgtgccccatctctccctctatttccctctacgttggtttgtcagagggaaatgggtcccactctgctgttgtgacacttgcgactcagctggccagcctctgcacgtgtccatctgatgccctcctggtctccatggcgaagggtcgaccctcagtcatttttctttttcttttttttgagacggagtttcgctcatgttgcccaggctggagtgcagtggcgcaatctcggctcactgccacctccacctcctgggttcaagcgattctcctgcctcagcctcctgagtagctgggattacaggtgcccaccaccacgcctggctaactttgtatttttagtagagatgggatttcaccatgttggtcaggctggtctcgaactcccgacctcaggtgatccgcccacctcggcctcccaaagtgctgggaggattacaggcgtgagccaccgcgcccaacctagtcccattttattactgaatagccctccatggcgtagatatgccgagctctgtttatccagtttttgaatatttgggttgtttctgccttttgactataatgaagaaagaaaaatacatctttgcgtgtatgtgctttcctttctcttgggttggttttgtaaaaaaaatggatttgtgggacttctaacaattttgggttggagctcttttcctatagttgtaccttctcccgctccatggctttgcttattctctctatgatgtcttttgtttgtttgtttgtggtttgtttttttgaggtgagtcttgctctgtcgcccagactggagtgcagtggcgtgatctcggctcactgcaacctccgcctcctgggttcaagcaattctcctgcctcagcctcccgagtagctgggattacaggcgcctgccaccacatttggctacttttcttttttttagtagagacggggtttcaccatgttggccaggctggtcacaaactcctggcctcaagtaatccacccgcctcagcctcccaaagtgctgggattacagacgtgagccaccgcgcccggcccacaccagtctttaaaagagggaggcaggaggcacccagcccctccctgcccaataccattctgaacaggagttacgctagtgtgctgagctctcagggaagctgttcccaaagttttgagcaggggagtgacagagccatgagacagggttgggggaagctgtggcatggtggcctcaggaggaacagtgggcaggggctggttggggggcaatgagtaccctcctctcgtgtggaatgcacgcagcattcctgtcctctctgagcctcaggactccctctgaaaggctggactgagctgacatgcggagtttgggagctggccacggtgagggatggggggcttcagggttgggtggggagtgaggcctttgccaaggcggcctggcctgcagcttctctgcttctttccccaggtctgtccccaacacagccatgcccagaggggtctggtgattgcagaaagcagtgtgagcccgactactacctggacgaggccggccgctgcacggcctgcgtgagctgttctcgaggtaagggcctcgtccctccccgggcctcagtttacctctctgcatttttgaaccgtgaacttccagtaactactcccccttatgtttgtgggtttttgatgggggtcgcctcttttcagagggcttccattggcatattatttccttccaggaagcgtttgtgaatcacccacctgttccaaactcggctcatcaatgtttgtaactactctgtgattcaagcattgtgatcattccccttttacagaggaggaaacggaggctttgggaagtcagggaacttccaagggctgtgggctggagtttgaacccagacaggtgccaccaggttccaggttctcgtccactccactcgctgcccctatgagccacttattctttttttttttttcccagacagggtctcactccttcacccaagctgcagtacggtggtgggatcatagctccctgcagctgtgacctcccaggatcacatgatccttttgcctcagcctttcaagtggctgggactataggtgcacactaccatgcctggctaattaaaaaaaattttttttcatacagatgggggtctcactatgttgcccaggctgctctcgaactcctggactcaaatggtcctcccaccttggcttcctaaattgctgggattataggcatgagccaccatgcccggcctgcgagctgttttgacaagcacttactgagtgcacagacacagcacgatgcaggtgtggggcttccctgtgcccagcccatcacaacctcccagcgccagcagcaccccgaggggcatgtgggcagggggtgttgctcaggccacaggctgctgtgactgttagaggccctggctattcacggaggccactgggaatgtgtgtctgtctccttgtccagagctgcttttgggcagcaaagcagagtgaagggtcaggggaggccaaaaagaaccacagacactgtttgttgtcattggaggtctctgtcctagttactaaggctgcatagcaaattttcttaaaacttaattgtgaaaacaaatcattctttgtactcacagattctgtgagtcagaattcagacagggcactgcggggacagcttgtctctgctccacaatgtctgaggtcttagctggaaagcccaaaagctgcagatcaggaacttctgaagcttcattcattcacctgccttggggttgatgttggctcctggctgcagccttggttcccttccatgtcggcctcttcgtgtcttacctggggcttcctcatggtctggtggttaggttctaaaggcgaagtctttttctctttttttctttttttgtatttttagtagagacggggtttcaccatgttggccaggctggtcccaaactcctggcctcaagtgatccgccggccttggcctcccaaagtgttggaattacaagcatgagccattgcccccggccataaaagtcttgagagagagagacagacagaaagagagagtgagagagagacagaaagagggagagaaagagtgagagagagaaagagagagacagagagaaagagacagaatgagagggagagagacagagtgagagagagacagaaagagggagagagagagacagaaagagaaagagacggagtgagcgagagagagagagacagaaagacagaaagagagactgagagacagagagagacagagatagagtgtgacagagagaaagacagagaaagagagagagagagacagaaagagagagagagagacagacagaggcagcagccacccctccttttatgacctggccttggaagtcacacagaacttctaccactttctgtttgttgaggcaaccacaaatgtcacttgagaccaagggaaggaaaacagttgtacttcttgacaggtaggtggcaaaggctctggaagggccagaacatcactgcagccatgttttggggaaatacagtctgccacaaccaccatgtggacatatggagaaagaggtgttggctctgggcccagtaattccttcagctctcctaactgaaaccccacgaggcagtggagtggtgtattagtagctaaaggcatgagctctagaacccgagtgccgggttcagatcccgcctctcccacttgatagcctataacctcaagcaggtttcctaacctctctgtgcctcagtttcctctgctgcaaaatgggcatagtattatctatctcagagaaccatgtgagaattgaatacatgattgtaggttaatctgggtagagtgctgagactactgtctcacacatactcagttatcttaagagctataataataatgataatagctgccattgtcccaaatggtttcattcattgctgagctcacacacaccctttgcacaaattccccaaatcctgcccagttcccttgctctggatgttgtaagaagagactgtccagcccttatcattatcatgctgggtctctaagtatcctgctgattgagatctaccctcgcggagaggtcccatttgcctaatctactgatgcagtcgttctgtatttacctctaagtggagcgttgcaaaatattcccgaatacgtacaaatgcattattacacttattaaaaataatacctctaacatggtttttttttgcttttggaggaaaaaaaatctttttttttttttttttttttttttttttaaatagacagagtcttgttctgtcgcccaggctggagtgcagtggcactatcttggctcactgcaacctctgcctcccaggttcaagtgattctcctgcctcagcctcctgagtagctgggattacaggcacgtgccaccaggcatggctaatttttgtatttttagtagagacggggtttcaccatgttggtcaggctggacttgaactcctgaccttgtgatctgcctgcctcggcctcccaaagtgccgggattacagtcgtgagccaccgtgtctggccaaaaaatctttttattattaaaaatttcaaacatattcagatgtagagtgagtcagagatggctgcgtactatcacccagctttaaacggttatggagtcatggccagtcttggctcctctgcacccatgcccgctcaccccgtcccctggaggactttcttttaacagctttagggagagatagtgggcatatggtaaagtgcatagattaaaggatgcaatctgataagttttaacaaatgcatgcagctgagcaaccagccatccccctctaaaagttacctcgggttgcttgtcaccatttcccatcccctgcttatggtcaccatgcaatagcttgcatgtaaatgcgacatacagaataccctcgctttttgcctgccttctttcaccctgcagaattattttgagcatgctgggagagctgctcaacggcatagtcagacgagcatttattttcttgttggatgacccttggacaactgcttctctgtcttcctgggggctctctggaccccctgcccttgccatactgatctttctccgtgatcctcatctgtgtcccttagatgaccttgtggagaagacgccatgtgcatggaactcctcccgcacctgcgaatgtcgacctggcatgatctgtgccacatcagccaccaactcctgtgcccgctgtgtcccctacccaatctgtgcagcagagacggtcaccaagccccagggtaagcagttcccaccccaggcctcgaccacagggtggagtctgtgcccccactgttgtgcctctccccaccaacagccaggggtggaggcaaatgacctacaccctcggctgttcattaggtcaggtttgggttctggttatcctttgagtagtcagactcagtgaatggaatgataaaatccagttttagcattttggcaagagattctgttgattaaaaaaaaattcttcctgaaattattgggctggtaaaatctttatatttttgagatggagtttcgctcatgttgcccaggctggagtacaatggctcaatctcggctcaccgcaacctgcacctcctgggttcaagcaattctcctgcctcagccttctgagtagctggggttacaagcattcgccaccacagccggctaatgttgtatttttagaagagatgcggtttctccatgttggtcaggctggtctcgaactcccgacctcaggtgatccacccaccttggcctctcaaagtgctgggattacaggcctgagccaccatgcccagccccgggctggtaaaatcttgacctgtttgcaaggctgttttattgacttagagagatgaatatcaagtttctgaagagatttctaacaggacggttggctttaccagtgtgcaggaaactaaaaccctgacagttttttgttgttgttgttttttgttttttaagggctttgagagattttaacaaatctccaggtggtttaaaacagatggaagagtggtgacaaaaccaaggggaatggccaggcgtggtggctcacgcctgtgatcccagcactttgggaggctgaggcaggtggatcacttgaggtcaggagttcaagaccagcctgaccaacatggcaaaaccccgtctctactaaaaatacacaaattagctgggtgtggtggtgggcaccgtagtcccagctactcaggaggttgaggcaggagaatcgcttgaacccgggaggcataggttgcagtgagccgagattgcaccactgaactccagcctgggcaacagggcgaaactctgcctaaaaaagaaaaaaaaccaagtggagggaaggtcacccaatgtgactctgtgagggctgccagagaagtgaggggtgacttgcttctaggacccccagagaggctctgggcttggaagaggcaggcagatgaagagcgggagggaagttgagaggtgtgaggtgtagtggcctgggactactaaatcttcaaacacaacttcaaaatgtattacaatggcatggcatggccactgaccagtttgcacagatgatgcctgagtttttaatccccagtattgtctttttttttcctctttttttagagatggagtctcgctgtcttgcccaggccgatgtgcagtggtgtaatctcagctcactgcaacctccgtctcccgggttcaggcaattctcctgcctcagcctcccgagtagctgggattacaggtgcccgccaccacacccagctaattttcatatttttagtagagacggggttttgccatgttggccaggctggtctggaactcctgacctcaagtgatctgcccgcctccacctcccaaagtgctgggattacaggtgtgagccaccgtgcctggccaacaattgtcttcttgagtcagaacattgaaggaatatccggggaaagttcgggccactagtggggtgctgtcactctgtttgtaaagccctctttacttgggtatttggaagtgcacctgtcaacaggctagccacaccccatcaccctgaaatggaggctgccagctcacactctccgcccatgggcccagggttccctggccaacttcctactcagggaagagacccattgtgaacaggacatactaacacagcagaagaaactgtccccgctcagtgactggaatattcagtagagtccttaggattttattttgtttgcataaatgtatggggtacaagtgtaattttattacatgcttagattgggtggtgaactcaggacgtttagggtatccctcacccaaatagcatacattgtaccccttaaataatttctcatggtccacctacctatacctcccaccccctcacccttctaagtctctgttgccttttattccactctccagctccgtgtggacacagtatttcactcccacttagaagtgagaacaggcagtatttgtctttctgtgtctgaatgtctgcacttaagaatatggccttcagttccatccatgttgctgcgaaagacttgatttctttccttatgatggctgagtagtattccattgtgtatagatgccacatttatctattggtggatgcagcataaccctccccccccacccttttctttttgagacaaagtctcgctctgttgcccaggctggagtgcagtggtatggtctcggctcacggcaacctctgcctcctgggtttgagctattcttgtgcctcagcctcccaagtagctgggattacaggcgtgcaccaccacacccggctaatttttgtatttttagtagagacggggtttcaccacattggtcaggctggtctcgaactcctgaccccaggtgatctgcctgcctcagcctcccaaagtgctgggattacaggcgtgagccaccgcacccggccaagcataacccttttaaaataaatatgaatgagcaaagatttgtaagaaaaaccagccctacaaaggagaataaaaagatacgaaaccagaaattcttaccacacatgaagctttgataaatccaggaatagaagagtacttagcaacattaaattcgtgtctgcagaaaaattcacgaagtcgttacatccataaggtgggcacagaatgctatgaaaaggaacaatatgggatcagagggcaagaaaaggctttttagaaagtgtgcttgtgatcagcccatcatctctaggttctccattcacctttccatccctgccctgccatcaacgatggctccgcctttctcctctgtagggagcatgcagttaagccttgccagcagagggcgctagagggccatcgcaggaggaaggaggcttctggttgcatttgtttttttgtttgtttgtttgtttcttttctttttttgagacagagtctcactctgtcgcccaggctggagtgcagtgacgcgatcttggcccaccacaacctccacctcccgggttcaagcagttttcctgcctcagcctcctgagtagctgggattacaggcacgcgccaccacgcctggctaatttttgtatttttagtagagacagggtttcaccatgatggtcaggctggtctcgaactcctgacctggtgatccgcctgcctcggcctcgcaaaagtgctgggattaccggcgtgagccactgcgcccggccatttgtttcttcttgctcctgctgcctggcctggtgaccaccttgatgtggctctcccaatgcagacattggcacgtgccaggcctcatgtctgcaaaagtgtcctgactccctgattccctctgtgcatcccccaccagccacaggtctttggcaccccaaagtgctccaggcgtctcccccacagtggcagcctcaatttctctgtgcacctgaccagaagcatagacttcaggtcaaaaggacctaccaagagcaaagcaggattaatggaaattacccacgctacatgtaatagatgcaccaccatgattttatctacctgccggttgatggcatttgggttgtttccagtttagggctattatgaatgaaaacagctgtgaatattctttttttttttttaacatgtatgaatttatcttatatcttttattattatttttattatttttagagacagggtctcactctgtgttccaggctggagtgcagtggcatgatcttggctcactgcagcattgaactcctgggctcgggcgatcctcccacctcagcctcccacagtgctgagattactggcatgagccaccatgactggccgattcttgtacaagtctttgggtggatgtatattttcatttttcatgggtaaatacctaggaggagtggctaggtcattgtgctggtcacatagtcagaatgtttttgaggactagtcaaagctggatacctctggtctgatacaaccccttcgttttacacccagagagaagcacagggccgaagctagaaccagaatgcagggatcccaagggtcagcccagagtacttccactggaagacaccacccacccacctccttcttagttctgaacctagaatttacccagctaaattacagtcacttcagctaaattacaatcaagtttgaaggcagcataaaaacattttcagacataaaaggtccagaaggcttttcttcctatatcctctcctaggaagatatttgaagatgtaattcagctaagtgagggggcaaaaaagaaaaacaacaggaagccatggaatctagagaccagcactccatcctagcagagcaaggaagggaagtcccagaatgatgtggtatagaccagttgagccagatcagagcaggaaaatggaaggaaggctccgaggaagtgttcccaggaatagaagagagaattgtagtaaatttcatgattagtagagttgaaaagcctgaggatatggtgagggcacactgtccttttatcaacaagaaaaagaaaggcaattgaaaactcccgggaaaagaaaaagatgacaagaaatatacagtccaaatatgaagatgaaatttcacctgattttaagcgattgctggatgtacaaaaagagaatctgtttggccttgatgctgagacaattctttaaatggcccaaggactgggtgtttggatttaaagagaagtatatccatctggtaaataatattttttttagttcttaaatggaggctgagtaggcaggttcttttcttctcttccagtaggccattaccagagaacacaggcagaccaactaggggctagacaatgccttctcctcaccttcaaatccaaagaggaggaaaaggggaggatcactgactcagggaggaagaaggaaagttacaagttaggtatagtatattcagagaggggatgagaggcacccaagggatactaggttccccccttctgcacatacaggagggacagcagatctgtcgctggatttcagcaggtgtttcagcagcagctgagaccatgggcctgtctagttacatcaggctgccttggagagcaggcagggggctctctcctcatgatgctgactgggaatagccacagttaatgggtttgagcatcagagctccagtccactcaaagtaagtgttcactgaaacccaatgacctttcaaacactgattcaaatactgattaacgagcatgtaggaaccatcataacacatcgcatcatcttccccatagtctccaggctccagctaattcaggtaagagtccagtgaccttccccaaagaggggggttcctcagaaccctacaatgcaagaaataaattaatcctggctttacttttttgtctatttgaggaaaaatctgagaggcgtcacgaacactttgtagaggggagatgtgggtatgtgtgtggggttgctttgtaccacatcaaaaaggggtgcctccaccagggctctgggggtggagaggtgtagtgactgagcataacccacttctaatgtgggccaaattatcctgccccagaaaagcaggaagctttgaagaaggtgcccagtccccaggcaggaggcagtgccatccagaggagagtgctctgggctggaactcgccatctctgtttcctggctgtagctccagccctgcggctctctccatctgtaaaacaaggtagctgggtcagaccagtggtggccagctatgaactggccttcagagacattccgtctggccagcatagcaatccagccacccttcctaggcactcaagaggaatgaaattatacgttcacacagaggcacgcacaagaatactcacagctgccttgttcgtcatagttcaaactggaaacaacccaaatgtccatcaactagcgaacgggtatgtaaacagtggttcatctgtacaacagaacgccatttggcaacagaaaggaatgaagctgaatgaatatcaaaaacattatgcagagtggaagaagccagaccccaaagagtacatactgcatgattctgtcgacatgaaattctggaacagatacactcctctatagtgacataaagcagatcggtggttgcctggatctggaggtgggggcagagtgagtgaggaggggcactagggaaccttctggagggatgagaatgttctgtattttgattggagttagttacctttgtcagaactcatcaggctgtacacacttagggacattttctttttttatttttacttattaaaaatagagacagggtcttgctatgttgcttaggctggtttcgaactcctgagctcaagtgatctgcctgcttcagcctcccaaagtgctgggattacaggcgggagccaccctaccctgccaggggatactttcttgtatataaatgttgccttaggctgggcatggtggctcacgcctacgatcccagcactttgggaggctgaagcaggcagatcacttgaggtcaggagttcgagaccagcctggtcaacatggtgaaaccctgtttctactaaaaatacaaaaattagctgggcatgttggcaggcacctgtaatcccagctactcaggaggctgaggcaggagaatcacttgaatccgggaggcagaagttgcaatgagctgagatcgtgccactgcactccagtctgggcagcagaggaagactcaatctcaaaaaattaaacataaataaataaataattccttaataaagttgatttaaaagaaaaaaactttaaaaattgaggctgtatttaaacattaggcgatttcagttttctcttaaaagcaaaaggtctagcgtcactgtttcaccttcctgggtgaccacagctgttagagacaagtagcaacttctccactttgttttatttattttgagtctttctctgtcgcccaggctggagtgcagtggcatgatctcagctcactgcagcctccacctcccgggttcaaacgattctcctgcctcagcctcctgagtagctaggattacaggtgtgtgccatcacacctggctaatttttgtgtttttagtagagatggggtttcaccgtgttggtcaggctggtctcgaactcctgacctcaagtggtcctcctgcctcagcctcccaaaatgctgtgattacaggtgtgagccaatgtgcctggccagcttttccactttgatcttttgaaacacaaatctgactgtcttagctcccacggtgttgcctcgctggaagccaccagtccctgctggttaactctttcctggagacaccagcctccttggcgctggttctcagatgttacgtcccctctgcagatatggctgagaaggacaccacctttgaggcgccacccctggggacccagccggactgcaaccccaccccagagaatggcgaggcgcctgccaggtgactcccccaccccttctctctgtttggctgctgcaggagggagctgtccctgccatgcccaggggatgcctgggaggcagctgggctgggggtggaggtggggcctgggctgctcttttgttaaatgtgtgcccatctctttgctgacaccattggaaagccagaaggccttgaaacccagtccctgccctcaaaatgcctggcagagactcggggcagaggatctaggggcccaggctctggttgcgcagtctccagagaaagggaattattcctgaagacccacttccctcttcccatcttcatcactcctgccttgggcttctccccgcagcaccagccccactcagagcttgctggtggactcccaggccagtaagacgctgcccatcccaaccagcgctcccgtcgctctctcctccacggggaagcccgttctggatgcaggtaatggtcccagcccactcacccctactcccagcaggggcttcctcctggggaagtgtggattgggggagccaggagggagcttctcctttgtgggtatggtctgagaagggggattaaggttgaccccaggtttctggcttcttgagttggtgctgtggctctggcacttgctagtgactattcttttctttttgaaacagtctcactctgttgctcaggctggagggcagtggcacccatcttggctcactgcaacctccacctcccaggttcaagagattctcctgtctcagcctcccgagtagctgggtttacaggcgcttgccaccacgcctggctaaatttttttttaatttttagtagagacggggttttgccatgttgtccaggttggtctcaaactcctgacctcaggtgatccacctgcttcagcctcccaaagtgctaggattataggtgtgaaccactgcgcctggctgctagtgactattctttaattcttgtaggcaggaatttttttcacagcttcatcctcgtggcttataattgctactcagaaaataggtctttgttgattgatttcatgactttgactagttgttcgagcctttgagcctcagttgtctcatctatacaatggtaatggcagagaccgtgcagggttataagcagtgtagcattgtagacggcctctgtcagagttagctcttaggctggacgcggtggctcacgcctgtaatcccagcactttgggaggccaaggtgggtggatcacgaggtcaggagtttgagaccagcctggccaacacgatgaaaccacatctctactaaaaatacaaaaattagccaggcgtggtggcgcgcgcctgtaatcccagctactcaggaggctgaggcaggagaatcgcttgaacccgggaggcggaggttgcaaggttgcagtgagccgagattgcaccgctgcactccagcctgagcagcagaatgagaatcagtctcaaacaaaacaaaacaaaacaaaacaaaacaaaacaaaacaaaacaaaacaaacaaaacccccaagagttagctcttagggaaagatgccaggttactcattttaggacttgcagttctagtggctgacacgaggtggcagtagtgctccggccagagtttctgaaagtgcggtcccgtctggcagcattggcaccggctgggaacttgttaggaaagcaaattatgggccccatcccagacctagagaatcagaaactgcactttaacaagatctccagggcactcatgtgcacattaacgtttgagaagcacttaactggcatatactactttttaaacatctaaacatggacttcaataaagtgcaatcactagctctatgatctctgtaagtgacaaaagggaaaaacgaagcgagtttagtaccgaggtgtgaagaagtagatctagataggggttaagagcgtggccctgcagtccccccggcctggcctggcctgggctggggctctgccacttactctcagggtgaccttgggcaacttaacgaactttcgtgagcctcagctcccctcatttttaaactgaaggtagtgacggtgcctagggcatagggttggggatcattcattcagggaacgcttgtggggtgtgtttatgtgcagtggggactccatgcctgccctcatcaagcaggtctagagggttggccgggaggggactgggttcaacctcttccttcccctcactgcttggccctccccaccctgactccggccacaccagcagtgctgccagatgccggtcacaccgggccctcgtccacagtccccaaattttggtctattggacctcaattcctttgttctggctcctagacgcctcaatttctcactctctagacacagtttgcccttctctcagccttcaatagttgatcagcttcctggagccaggcgagggagggctggatgagataagagccttggcttggaaaggacctgttgttgttagccatgatggaagctgtgtcccaggagaaggaggaagtcgtctggggctggggctgtcttgtgtggttgcagcaaggcaaagagtgtggggcgtctctgtgttccagggccagtgctcttctgggtgatcctggtgttggttgtggtggtcggctccagcgccttcctcctgtgccaccggagggcctgcaggaagcgaattcggcagagtaagtggctgtgtccttggggccttggggaggacaggttgctctctgccagcctggcctgggttctttccctgcctgctcctgctctctgaggccgccacccccagccttcctcctggtgtcgtttcagagctccacctgtgctacccggtccagacctcccagcccaagctagagcttgtgggtgagtgtccagccgtccaaaggggctgcccgagccagaggaacacagggcagctctgggcccggggcgtgggctccagagactgaacttctaccccagcctcgaagctccctgtctgtggctcctgtcgcattctgtacatctgtagggatgcaatgtgggtgaaaactcatgcgtgtggagaatgcaatgaggtgaagactgtactgggtgtgacgactgtgtggcttgcccagagcagcacctggatggatgctggcatgaacgtttaaaagtctatcttgtctgtcactttttcctccagtacccccagggggcattcctgccagccttgccttcctctctacattctaccctccctttctccctctccctccttctctttctctttcccctctctccccctcttctaccacctggcaagtcagcccaggggcaggaggggaaaggagcacatggggcaagagggaccctggttctgccacttacaagctgtgtgaccccgggtgagttactgaattgtcctgtgtctcagtttcctcatccggaaaatgcagatggtagaatctacttcagaggcttggcctgtggattcgtcgaggtcgggctgttaagcgcatcgtggagtacctgcctgcagtcggtggctgctgcctattgacaggctggcctgtgcctggggctttttccttcctggaagcttcaggccttcctgagtcctgggtgcttctgaccccctccctggtccctgcactctgatccctgcccagcctctgggccagctcttccaggcagcccttgggagctggaaccctcctcacctgtccaggcagggtcgtctatacagcgtgtgtcttctagctctcacctggggcagggggctcccagctatcttgtgccaagcaccttctctctcctgggcagccccttcaaggcaggccagggtcttcctcagcactgcatggcatggattgggtgcctgctctgtgctgggctctgatgggggaatcgtctgagccttcgtttctgatttgcaaggtgggctcccatacaggcttcctgtactcccccagtgatgacctttgttctgcaaggaggaggcagggctcagcaaggtggacggctggcccagggccacacagcctggcagtggcacagccagcctcaggcactggtcctaggggttttggtttgtaaagggctcagccctgtcccctcttccttccccctgccagctctgtccaccatcgcaatgcctacccaagagccacgtgctcagcctaaggccaggccctggcccgtcccctgatctccccaggacccttgcagaggcccttgcataggctgactgttgacttgggcacaaaaacacagtccactgaggcatgttttgaatttgacgagtttcacaagcaagcactgtggtccctgtgcaaggggggtttttgtgttttgatagtttcaagcctgtttccatgacctgtcaggctgagtgtctcattgaaaccggcgtttgctttcttgacatttttctagtattagaatttccattgccgtcagtttattttttttcttcaaacctctgtgagagcagttttgttacagaagaaaaaaagaaagaaagaaagaaaacaccttcccctaagaagccaggtctacaaagaactgagccctgagactcaatggtggacatcttatctcaggtcgtttttgaccctctagcttctggtgggaccttggggtctgggttccgaggctcaagatggacagaaagtgaagccaagacaggcaagctcacagggcaccgggtgagaatggaccgagctggccggatgcccctttccctcctgagccgtgggtggtgaaggagggaaggagcactggtttattggcactggtttattggttcgttcattcatctattcacatggtcttcacggagcacttcctccttgcaggctctgtgccgggcccagaagctgttctagctccctccaagcttttagactaattccgactgcccgcagaggccaaaggcagacgggaggggagtgtgcgccccttggcctcccacatcccagacctggggcagagggtgctcttggttcctttgagcagtgagcacatcagggatctgtggtccgtgcaggtgcgatgagaggcccaccaaccagccctcgagtggatcaaccttcccgtgtgtgtcctcggtgacaggcatttgcaaagcacacacgtgatctcatccactcctccggtggcctgtgaggtacttactgttatccccgttgcacagattagcagcctaaggcacaggatggtgaagtaattcgtttaaggccacgtgctgggtgagccgtaggacggggattttatcgtggttgttgagatgtttgtaaaaagatttttcacccttggcaccattgacatttgggaatggatggttctttgctgtggagcgctatcctataggacgttgtacagcccctctagatgccagtaaccttccctacttgggacaaccaaaaatgtctctagacattgccatgtggcccctggggaaaacctcctggttgagaaccactggtctaaaattctttttttttttttttttttgagacagagtctcgctctgtcacccaggctggagtgcactggtgccatctgggttcactgcaacctccgcctcacgggttcaagtgattctcctgcctcagcctcctgagtagctgggattacaggctcctgccaccatgcctggctaattttggtatttttagtagagacggggtttcaccgtgttggccaggctggtctcaaactcctgacctcatgatccgcctgcctcggcctcccaaagtgctgggtttgcaggcatgagccaccatgcctggccttaaaattcttttaatccttcatttttatgagcacttgagtcaatttctattattccagggagatttaggttgaaagaaattctttttttgttttgaaacagtttcaaacttatagaaatggtataagtatgaagaattcattttgacctgaaccatttgagagtaactgactgactggatgtctctcaccccgaaaacttcagtgtgtgtttcagacagacaagggtgtattttacacgatgtggtaaggatcgtcagaattggaattcacactgatacatgacccacaatgaattctcaggccctgttgaagtttctttatttgtcccaataatgtcctttatagcagaggactccagctcagggccacgtgttacatttgcttgtctggtttctcgagtctccttctgtccggatccgttccccaggcgtttctttcacttactgggaagagcgcaggctggtgatttcatggatgctccttgctttgggtttgtctggtgttttctcccgagtggattcaggtcatgcatcttgggctggaaggtcccaggaatgatgctggcctcttctctctcagggcgtcctgccaggtttcgatgtctccctttcctggtgctgtgtactttgagcgctcgacggaggtgatgtcctgccgggcctctccactgtgacgtctccatttgctcctcggtcattactaagtctttaggggcgttacttgagactatgtcaatagcccattcttcagcagaccttcattttctctatttatttgtttatttttttgagacagggtctggctctgtcacccaggctggagtgcagtagtgtgatctcggcttactgcaacccccgcctcctgggttcaagcaattctcctgcttcagcctcccaagtggctgggattacaggcgtgtgccacacaatgcctggctcattttttgtattttcagtagagacagagtttcaccatgttggccaggctggtctcgaactcctggcctcaagtggtcctcccgcctcggcctcccaaagttcagggatgacaggcgtgagctgccaccgcgcccagcccagaacttaattttcttcacttacatatttatatctgtatggattcatggggccctgttctgttcaatgggttgtaatctcttaccatcattttttattttggtgctcaaatggtcccagatgaggtcagggagagcccctttaagctggctcttgtgtgctttggtgtatcctcatcctgtgctttgagcacgtcccttattctgagatgttcccagcttaacttgtgtgctcctgccccggccctggaatcagctgcctctccaaggagcccggggtttgcatctcggggtacctgttgccaaagcctagctgaacctctgtgccaaattccccccttgggcctgttctgcttcccacagcactggggaatcacaggccagagaggggaggggactaaaagtggagaataacagggatggaagggaccgagagctttacatcgcatgtgagaacgcacgtgctccgtgagcgtgggcttcagagcagcctgtgacaccgtgcacttgtgcaagggggcctgctgctgcccagcatggtcctggacttgtgtccctgggggtaccagacaggcttacaagaagacagtggttattccaaaaggcaaggaaaccaacaaataagactagcagatagaatcaacatttttaggggaagagcagttatgaaatctgacctctgtacttggcaagatttgttctgggtctttatcaaaatcctcatgggttgtaacacggctcttgtcaatgtcagagccttccagattccgcctttttacctctgtgattttacacttgtttgggagagtcggtattgaactctgactttccattcagtgtgacggagtgcagagccatgttacttaccatcctgggcttttcctgaacctgctgtgtgctcaacagcatcctggacaccttctttttaaaatattttaatttttaaaaattctaagtaggccaggtgtagtggctcacacctgtaatcccagcactttgggaggccaaggtgggtggatcacctgaggtcgagagttcaagaccagcctggccaacaagacaaaaccccatctctactaaaaataaaaaaattagccaggcatggtggcacacacctgtaatcccagctactcgggaggctgaggcaggagaatttcttgaacctgggaggtggaggttgcagtgagctgagattgcaccactgcactccaggctgagcaacagagcgagcctccgtctcaaaacaaacaaacaaacaaacaaaaaaacattctaagtggccttcatttttaagttttttgttttttgttttggagacagggtgtcactctggagtgccatggtacaatcatggctcactgcagccttgacctcctgggttcaagtgatccctcagcctccccagtagctgggactacagatacacaccaccacgcccagctaacttttctattttttgtagagaccaggtctccctttgttgtgcaggctggtctctaactcctgagctcaagtgatctgcccacctcggcctcccaaagtgcttggattataggcgagagccactgtgcccagctagtcctcattttttttttgaggcagagtctcgctctgttgcccaggttggagtgcaatggcgcaatctcagctcactgcaacctctgcttcccgggttccagcaattctcctgcctcagcctcccgagtagctgggattataggcgcgcgccaccatgcccagctaatttttgtatttttagtagagatggggtttcaccaggttggccaggctggtctggaactcctggcatcgtgatttgcccacctcagcctcccaaaatactgggattacaggcatgagccaccacgcccagtctcatttttaaaaatagttttagatgtacagaaaattggagaagacagcacaggagttcccacatgccccacacccagtttcctctgtgattagcatcttaagccagcatcgttcatttgtcgaaatatgtgaaccattattgacacaggattacaaacgaaagcccacactgtgttcagggttcccttgcattgcctaaggttccaggatcccatccaggagccacgtcacattcagtcatcatgtcgccttaggctactctggcctgtggccgtttctcagatcttgtttctcaagaccagtttccctgatggccttggcagtttttgagtattgatcaggtgttttgcgggacgcctgtctcctgggatctgtctgatgtcttccccatgattagactggagttatgcattgggggaagaagaccacagaggtgaaacgtcatgctcatcacatcaaatcttggctgggcgcagtggctcatgcctgtaatcccagcactttgggaggccaagcctggcagatcacctgaggtcaggagtttgagaccagcctggccaacatggtgaaaccctgtctctaccgaaaatacaaaaattagccgggtgtcatgacacgcacctgtagtcccagctacttgggaggctgaggcaggaggatcgcttaaaccccagaggcagaggttgcattgagctgagaacgtgccactacactccagcctcggtgacagagcgagactccatctcaaaaaaaaaaaaaaaaaaaaaaaatcaacctgatttaccactgggcaccttcacttttgatatctcttttaatcttctcaacaagccccaaagttgatgtgattcatcccattttccagctgggaggacagaggctcggagaagggaagtaatattgtgctgagtttcaccgccaaggaggcccctgctccagggtggctaagcggcctcattgtttttgacatttggctggttttcaatttgagggttattataaacccgctgctgtgctcggcctttttgttttctttcgggttatttcctgagggtgtgttccctcaagagggatgactgggtaaagagtgtgaggtttttgttgccagatggctctttagaaaaatggaaccagcctgcagggtatgggcagctctgcgatcccgttcacccacttccccttcaaggccgagttgtgtcatttttatttattttgttttgttactttgtcacactttttttttttttattctgttggccacccccagtgacttggtaccaaagaacagttggctgcttgtaaaactcaaaatcactctggagggaccatgatttagtttcactgacgtcattgaaaagaatgtgcctcggccgggtgcggtggctcacgcctgtaatcccagcactttgggaggccgaggcgggtggatcacgaggtcaagagatcgagaccagcctggccaacatggtgaaaccccgtctctactaaaaatacaaaaattagctgagcatggtggtgcgtgcctgtaatcccagctactcgggaggctgaggcaggagaatcgcttgaacccaggaggcggaggttgcagtgagccgagatcgcgctgctgcacttcaccctggcgacagagttagactccatctcaaaaaaaaaaaaaaaaaaaaattacccctggccgggcaaggtggctcatgcctgtaatcccagcacttcgagaggccgaggcgggcagatcacctgaggtcaggagttggagaccaacctggccaacatggtgaaaccttgtttctactaaaaatacaaaaattagccgggcgtggtggcacatgtcggtaatcccagctacttgtgagaattgcttaaacctgtgaggcagaggttgcagtgagccaagatcgtgccactgcactccagcctgggtgacagagtgagactctgtctcaaaaaaagaaaaaattacccctaagagtgtttcccaaactcacctagtgtccacacagcgtgttcaaatggtcagtcttgcgtatactttatcctacttgttgactgagcactggtgagcatatctgtgaggactcagggctggtggctctccagagctgctgaagtcagagatgtgtgcaggaggcggcgtggctgacatacgggcatcttggtggcagatttgtctagccagggatgtgtgcctgacaacagcatattccagatctccgtaggtagcgttctcaggagtggttaaaagctgggcatccctggaggatggtctgctctgggaactgacttgctccaggatgagctagatgcccggatgccctctcacctttctcagatggccagtgagccaaggttaaatgttaaatgtcaatatgtgcttgggcgtgacctggcccctgtttaatatgggagaacaatgggagtggagggtagaggtttgagatgagaagatagaggttgtgcgttgagaatcattgtatcagcacctcctgagcctacaaaaggatgggattgaaggaaatgagatggcccgagagcagttgtcctcctcgaaggctgccacctgggtgctttcaggcacaagaaagagaaaatcgaagtccagctggagtcagaagggctccacagcagactggcttcgggcgtgtcccaggcagggtccaggtggcatctgcaggatccatcatcctgtctccatgacctgccttgaggtcctccatgtgggttttgcctggtattccagagaattcggggctctccacaccctggagacagtaaggtgggcgcagcagccacagacgagcctctgacccagtggaagcctcctgggctctggttgggcctgtgcttctcgtgaaccaatccttgcatgtgcgcgggggtgggggttgggagagtggttcagtgtgttcattggtttagtcattaggaatgagagtggcagccaggtgtggtggctcacgcctgtaatcccagcactttgcaaggccaaggcgggcaggtcaggaggtcaggagtttgagaccggcctggccaacgtggtgaaaccccgtctctactgaaaatacaaaaaaaatagctggggttggtggcacgagcctataatcccagctattcgggaggctgaggcatgagaatcacttgaacccaggaggcggaggttacattgagccgagatcatgccactgcactctagcctgggcgacagagtgagactccatctcaaaaaaaaaaaaaaaaaaaaggaatgagagtggccaggggatagaggtggtcccctgtcctccatctgccactggagaagtgagcctccttgccttgagctggggtgggcactgactctgaaacccatcgagggctctccagactgaggacctgacccctgggctgagttcagcaccacctgtgatccaggaggaccatttgccaatagttggggcgggtggggccgggggctgccagactccttggtgaagttgctgctcttgctttttgcagattccagacccaggaggagctcaacggtaagtacccctcccttgcccccacctcagcttcgtgcccctaaatctgactccttccctaacagatctgaagttttgagagctgctgggggaagggagagggaggggacggactggccattcccctcccacagtgcccagggtgcaggcccgtcctgcaagttcaggctgagtctgacccaccacagggacctctgtgcacagaggcctcgcctggggcctcagccaggccttggctaaggatggagagccccaccctcatagcagcctccagctcctggctcagcctgccgggaatttccagaagggcctgcacacagtggatttggtttgggccacttttgggtaccaggtctggtcaggaggaagactgtgttcattttccccttttctttactcttccatgaatctcatcctccaagctggatgacagagcaggtggctatggtccattcctttttttttttttccccatctgtcagttcttccattactttcttttaattcaagcattcatacattaagaagggtttctatcctttcatttttcaatataatatacacaaccataatgctagttcagtttcaaattatgggggatcacattcgaatatgcttggatgtgacaagtggctgttacaatactgagaaatttcatgaaagaggtattcaacaatttgtaaggtaatcaaatatgtttttgctgcataggccaatgcattaatagtaacttgttttaaaatgcagtcttttggccggatatgatggctcacacttaaaatcccagcattttgggaggctgaggcaggcggatcacctgaggtcaggagttcgagaccagccttgccaacatagtgaaaccccgtctctactaaaactacaaaaagtatccaggtgtagtggcacacgcctgtagtcccagctactcaggaggctgaggcaggagaatcgcttgagcctgggggacagaggttgcagggagccgagattgcaccactgctctcccagcccgggtaacagagtgagactccatctgaaaaaaaaaaaaaaaaaaggcagtcttttagccttcatattattatgaaagagtattcaagattatgtattaaggttggtgccatttgccattaaaagtaatggcaaacctggtttaacccttctgataggtagttgtggatgttggggttgagaacagaataatctttgtctggagtgacaccacactctagaatttccactttgaaaaatactcagttcttttttttttttttttttaatttttttagtatttattgatcattcttgggtgtttctcagagagggggatttggcagggtcataggacaatagtggagggaaggtcagcagataaacatgtgaacaaaggtctctggttttcctaggcagagggccctgccgccttctgcagtgtttgtgtccctgggtacttgagattagggagtggtgatgactcttagcgagtgaagaatactcagttctaagctgtggttcctggtagaacaaactttatttttctagctcagcagtgatctggaagctgaggaatctcagcgccttttaaaagttattatgtggttttgttttaaaaagctcctgttttgggaaagtagaatttatgggtataacatatgttcattatttgtacataaaataaaaccatttaaaaagtaaaaaataataataataataatggcaaagacgtgattacttttgcaccaatctaaaagatacgccctctgtgccttgagaatcattgcgtcagcacgggcatccctgcctcctctgaattactcacactcactccattttgaaggcatcaggacatttcatgaggccacttctttgcccttacctgtaaaaatcaaaaactaaactgacactttcctcatgacatagctgtttttttgtttttttttgttttttttttgttttttttttagcatttagaaaatatttattaataatatacatgaatttagattatatagtatagaggtcaccgggcttgtcacttgaactaacagtagtctgtttttagaatgcttgagtgtgatcataaaagactactttccaggatgtcggggctggggagctggaggggctgctccaggaggtgggggacctggagctggtacttacagacttgggtgcttatgagtgtgggttatggaccagatgccagggttcaaatcctagctcagatacttattgatggtataaccctgggccaattactcgactcctctgtgcctcagtttcctcatctgtaaaatggggagtgggctgttacccacctcatacagtggttgtgaggattaacatatgtcaaggactttaggacagggccaacggacgtggcgagcaccctgtgagtcgctgactgttacccctactatttagtacaaattaaaagcaacagacttcacccagaaagctgagaagcccggggcagctcatggcagcttttaaagcagaaagggagactcactggggtctgtagagatgaaaaaaaaaaggggcctcccagttcagagactggtggggaggttgggggtaccctgcagcagcacccattcccgtcccacagcagctgaggagtggtgcgtcggtgacagaacccgtcgcggaagagcgagggttaatgagccagccactgatggagacctgccacagcgtgggggcagcctacctggagagcctgccgctgcaggatgccagcccggccgggggcccctcgtcccccagggaccttcctgagccccgggtgtccacggagcacaccaataacaagattggtgagtcagcctgttttgggaggtcccctgcagcccaggggcagatgggagatgaatacggggccctgggccctggaagggacctggagaccctggagttgaaaggcccaggaaaggagaggcatagattcttcaccccaactgaagtttctgtaagtagggacagcgagggtacttacctcgtaggccattgtgcggattcatgagccagtgtgcatgagatgcctgctgttactcataaaaaacgaacaccaccccagcccccaacaccgagcacccgaggggacaggaggaagacgtgccagtggtcacaggacctgccacttgtctggcgcattccgggcactgtgtaggtgccatctcttcatctctgatggtctcaccaccttctttggatggtgtctttctccccattttacagttggggagaccgtggctcagagggtgaagtgattttccccattgcatggctactaagtggcacagctggaactcgtcccgcatctgctgggccttgaagcccgtggtttgtccacgttaccacccaccctctgcagaagcaggaggacagatggggcccagatgttcagagcttcccaacggcagctgctgccagcctggacagacattggctttggcctcctgtgggcctccctgcctcctctcttgcttctcatcaccttggtacggcattttccccaaaatgtatacctgaccctattgcactcctgccgagaagcctccagcagcttcccattccctatgggatgaattccagcattcttattccagcactcaaggctgacagcaagttgtagctccccgaccagactcacctaccttctgaccccacagtctgtccctccccctcatggcagtctcccaaatttacagacccctctgtcacttctgagcttctcaatgggagctaccccctcgcctgaaatagccaactccactgccttgaatccagttaattctggatatcctggggaccctgcttatttgccccttcctccaggaagccttctgtgccctctccaccatgctatgctccctaagaacccaggcctcccctacccggtgtcctagcacccagtggtgtgactgcgtgtttatagccttcctccacctccacctggctttgtgctccctgtgggcagggccttggtggaccccacctctgtcgcttctggaagggtaactggcactgggataatactgaagagtcatttgtaattgtcctgtgcatttctatggcagacagtggtggccagaactcttcagggcagtcatcttctctttttattttttcagcctcctgagtagctgggattatgggcgagtgtcatcatgcctggctaattttttgtatttttagtagagatggggtttcactctgttggccaggctggtctggaactcctggcctcaaggtgatctgcctgccttggcctcccaaagtactgggattataggcatgagccaccatgcccagcctgggcagtcttttgtaacaaactgaagcttttgaaatggtagcttttagtaagttttatttgaaaagtatgtattttgggaaataccatcaaaggcttcttcagaattcctaagaagtcctaactggaacttctgagtccacactgagtacagtgcctggaatcccaggggtggggttcagagggtgtttgatggggaggagaaggaagtaccaggctcccaggcagctggctcaggtgtgggctgccctcccctggcatggcctgcaggccttgctggtgagtggatcgggggccacctccgccatggtggaaagggaaggccttggaggttctcttgggcacccaagacacaggcaacccccttgtcctcctaatgccagcccagggtagcgttcccccttcccatccagttcccaagaggggtcacactggggtctgtacatcgtccctcttcccctgggaaccaggcaagggaagaacccctttccccccaacttcctcacctgccctccccacatagccaagatgaattccctggactctggagctctggggagggggcaggaaatccatgcagcccttggaagccacccccacagcctggggagtaggcagcctgtgatgggggcagagccagagcggggcagacccctcatggccggctctgaagtttccagacccctctttcacttccgagctcagtgggagctgcttcctcacccagagcagccaattccaccgctttgaatccagttaattccagatttcctggggactcctgcccatttccctgaggaatgtgaggggaccagcctgtccccagctgtggctccttctccctaatccagcacccccaccctcacttccctcccacctgaccccacccgcctctcatcttctctgcccatccccctctgggccttctctcccctcctggggtctcctctctcaccacccccggcccccatcttttgcccagccctctatagggctcctagggctgggagcccacaagcctgatggaggtgtggggagtgctgaggccctgctctgttttggggtctgtgggggcgcccagcccatagcctgtcccgcactctgggccttctcctcttgctgccgtttggcgcacttctctctttcctgggggtgttcaaaaccagaatagaagaaccagcgtcatgcaatagggttgagggtgtgggggactcgagaacctttttggggttcctgaatccgaggggtataactgcattacccagaaaggcaggggtccctgcacccccaccccaccccagctctcaagttccctcttgagcttccccattctggcctccagagtccagcgcagaacagctgggagccagcccaccctgagccagacaccatcagctgggcggaggccaggcttccccactccccagctcctcgggccactgaacctgagcccccatgtcccctctatcagaaggccacaccagaagcccccacatcagactgtggcgaggaccggccctccgtccaagctcccaccatgtgctcacagcacagccatgcacgctgcaggcaggagaccggctgtgagcagtaagccccgaaattcacggcctgagccaggctgtctcaatcatgggctgccgagacctattgagggggccgggttttctgcaggatgtgacaggctggctgagtttgcccggaccgaggggactcccaggacacgggacttgcagtagtagaaccaggaatgttcccgggcaagctggacaagttggtcaccccgggttttggctgcaggcacacagataggagcagaaagggccaccaggcggagtgggtggtttttttttgggggatttctcctaactacgtggcgaccttgggcaggtcatttaacctctccaggcttcagattcttacctgtaaatgggaatcttgatggggtccgccttgcaggagggctggggacccaggagtgggggtgtggaaactgctcagctctgctgtttctgctcgtgctctggttacccacggctttgcctgtttttgtccacagtttgctttctgtcccaccctgtcctcttcttccctacccatccgcagagatgtgctgagaaaatcctaagtacaagtgggctggttcttaactcctcaaggcccagctcctagctgttctatttcctctgagcccccaggatgcctgtaaggtacatcagagaggctgtgccatcagcctgaagccacccggcaggtgtaccagcactgggcctcggcccttctctgcctctttgctcccatcctggctggtgctctggcctccctcgctcacccatccttttgccttgcagagaaaatctacatcatgaaggctgacaccgtgatcgtggggaccgtgaaggctgagctgccggagggccggggcctggcggggccagcagagcccgagttggaggaggagctggaggcggaccataccccccactaccccgagcaggagacagaaccgcctctgggcagctgcagcgatgtcatgctctcagtggaagaggaagggaaagaagaccccttgcccacagctgcctctggaaagtgaggcctgggctgggctggggctaggagggcagcagggtggcctctgggaggccaggatggcactgttggcaccgaggttgggggcagaggcccatctggcctgaactgaggctccagcatctagtggtggaccggccggtcactgcaggggtctggtggtctctgcttgcatccccaacttagctgtcccctgacccagagcctaggggatccggggcttgtacagaagagacagtccaaggggactggatcccagcagtgatgttggttgaggcagcaaacagatggcaggatgggcactgccgagaacagcattggtcccagagccctgggcatcagaccttaaccaccaggcccacagcccagcgagggagaggtcgtgaggccagctcccggggcccctgtaaccctactctcctctctccctggacctcagaggtgacacccattgggcccttccggcatgcccccagttactgtaaatgtggcccccagtgggcatggagccagtgcctgtggttgtttctccagagtcaaaagggaagtcgagggatggggcgtcgtcagctggcactgtctctgctgcagcggccacactgtactctgcactggtgtgagggcccctgcctggactgtgggaccctcctggtgctgcccaccttccctgtcctgtagccccctcggtgggcccagggcctagggcccaggatcaagtcactcatctcagaatgtccccaccaatccccgccacagcaggcgcctcgggtcccagatgtctgcagccctcagcagctgcagaccgcccctcaccaacccagagaacctgctttactttgcccagggacttcctccccatgtgaacatggggaacttcgggccctgcctggagtccttgaccgctctctgtgggccccacccactctgtcctgggaaatgaagaagcatcttccttaggtctgccctgcttgcaaatccactagcaccgaccccaccacctggttccggctctgcacgctttggggtgtggatgtcgagaggcaccacggcctcacccaggcatctgctttactctggaccataggaaacaagaccgtttggaggtttcatcaggattttgggtttttcacatttcacgctaaggagtagtggccctgacttccggtcggctggccagctgactccctagggccttcagacgtgtatgcaaatgagtgatggataaggatgagtcttggagttgcgggcagcctggagactcgtggacttaccgcctggaggcaggcccgggaaggctgctgtttactcatcgggcagccacgtgctctctggaggaagtgatagtttctgaaaccgctcagatgttttggggaaagttggagaagccgtggccttgcgagaggtggttacaccagaacctggacattggccagaagaagcttaagtgggcagacactgtttgcccagtgtttgtgcaaggatggagtgggtgtctctgcatcacccacagccgcagctgtaaggcacgctggaaggcacacgcctgccaggcagggcagtctggcgcccatgatgggagggattgacatgtttcaacaaaataatgcacttccttacctagtggcccttcacacaacttttgaatctctaaaaatccataaaatccttaaagaactgtaaggctgaggacatgatcatcgaaattgagagtatgttattaatagaacccctgagcagaagtggctttgggagtctcccagcagggcagggattcccactgaacccccaggcactaaggtggccagtctctggtagattggatacttctggggccgggagcccacttcctgctggggcagtccttcttgttgctggaagattttccttatcactcgaggcaaattctttctccatgtaattgccgctccctggtccaaaggctgccctttgaggacactcaaagccactgtcggccagttgcggtgcctcacccctgtaatcccagcacactgggaggccgaggcgagtggatcacctgaggtcaggagttcaagactagcctggccaacatggtaaaaccccgtctctgctaaaaatataaaaattagtcgggtgtggtggcgggcacctgtaatcccagctactcaggaggctgaggcaggagaatcgcttgaacctgggaggtggaggttgcagcagtgagccgagatcgtgccactgcactccagcctgggtgacaagaatgagactccgtctcaaaaaaaaaaaaaaaaaaatgccactgttgtcacaaggctccctttaggtattcgaagaaaggtttctgggcctccccatggccttcctccctctgggctgggccgggcagccccatagctttggagaagggattctccaaggaacagcgtgagtgcccaagccctgggaggcagggggaggaccacaggtatctgggatccctgggaggcagggtgaggaccacaggtatctgggagtgttgggcttcagtgtctgagctgggaggagcccagcctgcctccctgggcacagctttgtggcactttagggccagcctccaccccaggcagccagcctgaggcctcctctgactgtctcctgtgcgaggtggagaacacccacagccacagacagaccctgtccaccccatccccaagactccagcccacacccacacatcagcccagccattgaaccagccatgcactcagtccaggagccagggtggatttccccatcctgcccagcgatgagcggaccccttctattctctggctgtgctcacgtccaggttggcagatggacagagctccctgctactcaaggtagcaattctcaggctgtgacgacacccccacacacctcttcctaaacatttgcgatcagagagggacagcaagtggtaagtatcagatggaagctgttgccttcaaagaaaagccattgtttcccaaggcacttttgtaggtggtaaaaaccattctacagttcacagaatctccacggctcgggtcagtccctaaaacggaacgaggggacctccctagagcgtctctcgctccatcacgacctcaccctccaacagtgaggtgtaaaagacccaaggctgggtcttggtcatctttgtcccatggtcactgggcactgattggttgggctaagtagaaatgaaaacctgtgtggggatgagaggcggctctccagccacagttcctcgggtgccttctctcttccccccacttcctcgatcctctgcagtgggggggcaagtgtggggtgggggttgcttgggccagaatatgtggggacatcagattcacagccacggcccaagagaaaagcttagtcaaggcgagactgttcagcttcaaggggggctccttgggctgaaggagaagctgctgaggacacctcaggcccctgcaccctccaccaggcccctctgccaggcacctcctcctaagccagcaccccatgctggccaaacaccctggaacccttgcccctggctgacccaggggagcaggtgttcaatgttggggccatgggtgtgagccaggcacagggcagagaggcttgcctgccattctctgcagctcagacacaacagcagcgtgcggatggtgatggcgctgcggggtcacacacaggctcgaatcccagctctgccatttatcagttgcatgagcttggctatgttccatgatctctttcagactcagttttcttgtctgtgaaatgggggtgtcagtctctacctgacggggttgtggggcttccctgacatgccactcggtgtgtggcttgtgctgagtggcaggttctgtccttattccagcctggtggccgcttgtcaagagcgagcccttcctatgtctgcagaattcagcccatcaaggttaatcagagctttcaggccagcctgggaacctagccacccttggggccaacttgctgtgggaagccccgcagtgggcaggcctcttcttgttctgtgggctaccccaagaacccttcagatcacagtcataggactggctcattattcgacgtctgtaactctgggcatgtcggcgaagtgctgcgggtccctccggagggacatctcactcgtggttctagcacattccagattgcaccacattactgttcgagggctttcctcaattaaagggtctagctgctgaggactagtggggcacagacttgctctcgtgggtcctgtgtctggtggacgggacagacggtggcgtcatcaaatcagtacacaaggtcattccagagtcagatcacgctgtgaaccacaaggagtctgagccaggtactgtggcagagtgggaggggagggccaccactagctaggtggtcagggcaagcctctttgagaaggtgccctttgaacttggcctgagtgatgtcacaagccagcgaggtctggaaggcagggagctgaagtgggcacactcctgcctcgagtttcaggaagaacacagtggtggaagaggcacggtgggcgagggaaaaaaggaggtgaggggggaaggcctggggaggagggcctggtgggccattgtgattaggcacctagattttatcataaaagtactggtctatgtttctttctgttttcttcctagtagaacaataaacatcctggtattatttcagcaatcagtgagaaaggccaaaccaggggcggcaaaggttgttttaacctattttggagggaagttggggaaacaggcagcagctgctggcagccaggaagcagttagatgggttttctcagaaagaactaagacagcattcctggtgatgattgtagctatgggtagggttaggagtctgccggtctagcttccccctttctctgggtatcttccagagagtaaaaaccaaactgaaaaaccctgggaagcctggaggcctttgtttgtgttttggtgtggtgattgttttcccggtcatgaggcagagggatcatttcagtatcacagggtcagcggtggcctgtgctttttaccctttagccctcatggaggcagtggccatttcatgacggtggcatggagctgtggcttccggctcgacaagctcccagctgcttggtcccaagcaaagcccttatgtgcgttcaatgtgggttttctggtctgcaaaatggacctaatggggccaggtgcggtggctcacgcctgcaatcccagcactttgggaggccgaggtgagtgggtcacttgaggtcaggagttcgagaccagcccgggcaacatggcaaaaccccgtctcgactaaaaatacaaaaagtagccaggcatggtggcatatgcctgtgatcccagctacttgggaggctaaggtgggagaattgcttgaacctgggaggcggaggttgcagtgagccgagatcgtgccactgcactccagcctgggtgacagaacgagactctgtcttcaaaaaaaaaaagaaaaggaactataaggctgagagggactgtggaagtccagtctgggcacgtatgccatgttcagtaaatgacagccatcaagagcagcatcttaagagctgagagttcgcctaggccgcattctttgtacatctgggcttcctaatagaaccctggacagtagataggctgggtggcagcactcccttttacaaactgaggctcggggagtgggggggagcgaagcaactggcccactgccacacagctgggaagtcccagagctggagttcaacccccaactttgtgattctaaatccctccccatgcccaggtggcctggctgcctctgtggtcaggggttgtgttcatatcgtggtcatcccctggcactatgccttctagataagtttcctttcatcttcaagtcaccacaactgagagatagaatagaggctgattttattcctccctttatgggaaggcagggacagttgcaagaggcagggtaacctgcccaaggtcaaactccaggctgggtgtggctttctgactgctctgaccggacaggaaggacacagagctaacccagccagggcctccttccttgacacagctttcctcaaaggtgtgtgtgattttttttttctttctttctttctttctttttttttttttttttttgagacagggtcttcctctgtcacccaggctggaatgcagtggcacaaatacagctcactgtagcctcaacttcctgggctcacgtgatcctcctgcttcagcctcccgagtagctgggatcacaggcacgtgccaccatgactggctaatttttttttttctttttttgtagagacaggtctctctatgttgcccaggctggtcttgaattcctgggctcaagcaatcttcctaccttggcttcccaaagtactggattacaggcgtgtgattctgaggtccagggagactcggggctgggttgagtccagggaatctctgggggagaactgcctgagagtggaattgccctttccatccccagtaacacctcatatcctgctcactgccccacctgaggctccctgaaggaagacgatcaagaacaagcctcccattttacagatgggaaaactgagccccatagaggcaaagcagttttcccagggtcccagcttggtgctgtgtgatggagatagctctaactgtagctgtcagttggggctggggtaggggaaagtcactgtctagtccaagggagcagtaaagatgacatgctgattttcattcttcctttaaagaaaaaattgatgttaaaagtaactgtggtgagagggttgggttcttacttacaaggcagctttgcaagagtaaacagagtagacaaaaatatcccatcagctgggcttctgcagcttcacaagctactgatccgtgcagtcagagggccccaggttcagaagggccctgggcttggtttaatgctctgctgtcgccatcttgaaagtgatgaataatttttggcaaggggccctgtgttttcatttttcatggagttctacaaattatgtagctgatcttgcatgggggcagggaaatcgttaattcagaattcacttaatgccaaagcattttacctccattgtcatgtgacctcagagggaccttatagatgagcacacatgtccccatttttaagaagtgttaaatgaccagtaactgatgtaactgttccagtcatctcttgctacataacaaatcacctcaaaacttaatagcttaaaacaatggtcattaattttgctcacaaatctgcaatgtggcctggacttagcaggggaggtgcatctcggctcacatagtaccagcgggggtgatgagatgagctggagaatccacctccaagagggctggcaaattggtactggctgtcagtttctctctgtggagcttcttgggcttcctcacagcatggctgctgggttcctggagccaacaactccgggggcaggaagtagaaactgccagcgtcataaaatttgaccccggaaactggcactgcatcccctttgctgcattccaggtagtcacagagcccagactcaaggggaggggacacagatcccacccctcattaggaggagtgtcaaagaatctcgagatcttatgtgtcagcaggagcacttcacatactgtctcattttagcctctcggtaattttgccattattgtccttggagttggctcaaggaagctacataacctggtggaatcccaagttcctctggctggaatttggatccaagctggtctgtctccagagtgtgagctctggactgagcagctgacctgtgcattcagggacccatacagtcagaatgtggcaggactggaaagcaagctcacatctgtctgattagagaacatctgagcttggtacccatacaaactaggccctatctagtttttagatagggaaatcaaggctctgagaggtcttgccaggcctctcctgaggaagagggcagggtctgggaccttccagggcaggatggggcccccaacttgggttgcacagaaccatgtcaggaagtcacatagagttgtgggtagattatgcaagtacaggctgtcaggagggatgttgtttttcactgcaattacacttcactcaggaaatacagcttctgcacgtactgagggagggttcctcaccctgtgcagaagacctcctggtgaataccggggcactcgctgggtgaccctgggtcctctgggccaagttcatgcatcgaaagttccctgagaagctctttgtgcccatctgggttgggctttgacaatagagttgaagaggctttattcctgccatgcatggagtcacaggttagtaagaaagatgataagagctgtacttgaggctttcgtgtgctctcacttaaacctcacagtgcactaggaagtagttattacattacccctatgttacagatgaggaaaccaacacgcagagtggctaagccagttccccagggtcacacagctgctaagtggcgcagctaggctttgaacccaggccacctggctggagtctgcgtcctcacacacttggccatgctgctccattgtggctcaggccgaggtcaccactgtgctgaggccccagccctgagtcccagaccctgtagaacactgtgcaggcatccatggggctcagtgaatgcacagggaatggaatttgctcttggtttttatcccacctttcctttccaaagcccagctgtggccaggcctctccctcacagaaccttctatgactccctagtgcctacatgccaatgtctgccaatccagctttgctgctacctccacagctcccatatctaaacctctcctgagacccgactgtttccgctcagtcaccaaatacagagggcatatcctcatcatgaaatctctgctcagcgctccaacccctgaatttccaacctcatctttctcctcctcctccaaaaacccttccaggacacccaggcccaggacctccaagctcccacagcactgactgtgaagggggactggaggccaagttctagaagtcttgcaaaaaatatctctgaagaaatgcattcattcattcatacagccactcatttagtcactcaagcaacagatctgtatgtaacacctactatgtgttgggcactgtgcttggcgctggggaacacagtgaagtggggcagtggcggggatatacagtactgctctcagggagtcacagtccaactgggagaccaacctagagtctggtcatggcctagagcatgatatttgctttgatggagagcagcttggggttcatgaccctagtggatggcacctagcccagatggaggcaggtctctgctttcccctctgtagaatgggtttaataagagcacctaccccaaagagatgttgtaaggattaatttcatccattaatttgttcaataaatatttgtcaagctcaaactccgtgctggggtgctggggacacacagccctgccctctgcagagtgacaagaaagagtatttgggataacattggctggtggtaattgctgtaaagaaaaaaagaaagtggtgtgtaggccctcagtgtggtgaggtgtgtagccagggcttggggatgtagcacctgctgtacaaaggtctgggagaatgtagcgattcagggtgtgcagggggaagtgagtagttatgatcatgagtctgtggtagacatcgccccatccttgcatttgcatctctaggtttctacagaagaaagggggcaaggtgatggagagaatttcatgggcggaaattgttctacaggagctggggaggtaggctggcagggctgagccggctacttggtgggaggttgcaacagcctcaggacgggtggaggactgcaggggaactggagcccaagggggtttccttccagggtgaaggggaaaagcaaggctgggcactttgggaacttctcagggaaaccctctcctgtaccctaggggacctgggctccattctggaaaggcagaatacatgacctccatcacgttttgggtctgcactcattaagcacttactagatgccaggcactgtagagtctccatctcagatccttacagcacccctgtaaagcagaggctatttatccccattctacagatgaagaaatggaggctcagggaggtaaagtgatttgtccaaggtcatggttgcgtaccagtcaatggcctgaacagagacttgaacccaggtctaggtgatggcaaagttgatgctatttctccttttgatataccccaactgtctaaagcagcccttttttttgctaggcttcttggtgtttgaaaatttaccactcattcctaggagctaaaggttcctgggttcctccttggggcacatgtctaggagcaggatctcgatctggtggcagaggggcagcagctgctccgtctggcatacagtaggtgctcagtaagtctgcggggcaggcaggacaagcctgggttggaaggaggtccagtttcttgggagtgagagcctcaagaccaacttcacctgaaggacaaatgagaggtggccgaatcactgccagctacttcaagaagcccctaggacactccagccaaggtgccttggtcccttttctaagtcgcctgcccaccctgcccaagctcctgcggggagtgtgcccactgtgactcatccacgcccagccctgcccagctctcactggggcagcagtaggcacacatactcgtaaaagtctgaataagtgaagactgggaaattgcaccagggaaaaactacttatttcttcctcttttgaattggggaggggaaatgttgcgggggaaatgaggtcagtgacgtggtgagcatttcatgctccttactgatgagcagagggccggtatcacgtgctgccttcctagggagggctgggtagtgcgtcaaggaaatgggcccagagctgtgtctcgtccagtctagcaggaaactgcccatctcactgtgtcactcccttctctgtccttgctctaagcctctaccctgactgcccttgctctgagctgaaatctcactaatgagaaaaaaatgtgctggtttatgcctctgtgggctggctgggctggtaggtcccagggggcagcatggcctggaggaaaccgagtgcacggggcaaggatgatgtgcacgagtggtatgtgactcccagggctcacagcctcatgcagcccctccctctgagagtatagatggggaaactgaggcctgagaaggcgagagatgtgcctgaggtcacacagagaatccgtggccctcagcacaagcacccagtttgctggtactttaaagataaaaataaacaaactttataaatggaaaagatgaataaaagaagaaacgaagtataaggaatatgataaatataataaaaattacacacaatcttggcgaggcacagtggctcatgctagtaatcctaacactttgggaggcccagatgggcagatcatttaaggtcaggagttcaagaccagcctggccaacatggtgaaaccccatctctactaaaaatacaaaaattagttgggcatggtggtgcgcgcctgtggtcccagctacttgggaggctgaggcacgagaatcacttgaacccagcaggcg

SEQ ID NO: 1420 - DNA, 3688 bp, Homo sapiens
atacgggagaactaaggctgaaacctcggaggaacaaccacttttgaagtgacttcgcggcgtgcgttgggtgcggactaggtggccgcggcgggagtgtgctggagcctgaagtccacgcgcgcggctgagaaccgccgggaccgcacgtgggcgccgcgcgcttcccccgcttcccaggtgggcgccggccgccaggccacctcacgtccggccccggggatgcgcgtcctcctcgccgcgctgggactgctgttcctgggggcgctacgagccttcccacaggatcgacccttcgaggacacctgtcatggaaaccccagccactactatgacaaggctgtcaggaggtgctgttaccgctgccccatggggctgttcccgacacagcagtgcccacagaggcctactgactgcaggaagcagtgtgagcctgactactacctggatgaggccgaccgctgtacagcctgcgtgacttgttctcgagacgacctcgtggagaagacgccgtgtgcatggaactcctcccgtgtctgcgaatgtcgacccggcatgttctgttccacgtctgccgtcaactcctgtgcccgctgcttcttccattctgtctgtccggcagggatgattgtcaagttcccaggcacggcgcagaagaacacggtctgtgagccggcttccccaggggtcagccctgcctgtgccagcccagagaactgcaaggaaccctccagtggcaccatcccccaggccaagcccaccccggtgtccccagcaacctccagtgccagcaccatgcctgtaagagggggcacccgcctcgcccaggaagctgcttctaaactgacgagggctcccgactctccctcctctgtgggaaggcctagttcagatccaggtctgtccccaacacagccatgcccagaggggtctggtgattgcagaaagcagtgtgagcccgactactacctggacgaggccggccgctgcacggcctgcgtgagctgttctcgagatgaccttgtggagaagacgccatgtgcatggaactcctcccgcacctgcgaatgtcgacctggcatgatctgtgccacatcagccaccaactcctgtgcccgctgtgtcccctacccaatctgtgcagcagagacggtcaccaagccccaggatatggctgagaaggacaccacctttgaggcgccacccctggggacccagccggactgcaaccccaccccagagaatggcgaggcgcctgccagcaccagccccactcagagcttgctggtggactcccaggccagtaagacgctgcccatcccaaccagcgctcccgtcgctctctcctccacggggaagcccgttctggatgcagggccagtgctcttctgggtgatcctggtgttggttgtggtggtcggctccagcgccttcctcctgtgccaccggagggcctgcaggaagcgaattcggcagaagctccacctgtgctacccggtccagacctcccagcccaagctagagcttgtggattccagacccaggaggagctcaacgcagctgaggagtggtgcgtcggtgacagaacccgtcgcggaagagcgagggttaatgagccagccactgatggagacctgccacagcgtgggggcagcctacctggagagcctgccgctgcaggatgccagcccggccgggggcccctcgtcccccagggaccttcctgagccccgggtgtccacggagcacaccaataacaagattgagaaaatctacatcatgaaggctgacaccgtgatcgtggggaccgtgaaggctgagctgccggagggccggggcctggcggggccagcagagcccgagttggaggaggagctggaggcggaccataccccccactaccccgagcaggagacagaaccgcctctgggcagctgcagcgatgtcatgctctcagtggaagaggaagggaaagaagaccccttgcccacagctgcctctggaaagtgaggcctgggctgggctggggctaggagggcagcagggtggcctctgggaggccaggatggcactgttggcaccgaggttgggggcagaggcccatctggcctgaactgaggctccagcatctagtggtggaccggccggtcactgcaggggtctggtggtctctgcttgcatccccaacttagctgtcccctgacccagagcctaggggatccggggcttgtacagaagagacagtccaaggggactggatcccagcagtgatgttggttgaggcagcaaacagatggcaggatgggcactgccgagaacagcattggtcccagagccctgggcatcagaccttaaccaccaggcccacagcccagcgagggagaggtcgtgaggccagctcccggggcccctgtaaccctactctcctctctccctggacctcagaggtgacacccattgggcccttccggcatgcccccagttactgtaaatgtggcccccagtgggcatggagccagtgcctgtggttgtttctccagagtcaaaagggaagtcgagggatggggcgtcgtcagctggcactgtctctgctgcagcggccacactgtactctgcactggtgtgagggcccctgcctggactgtgggaccctcctggtgctgcccaccttccctgtcctgtagccccctcggtgggcccagggcctagggcccaggatcaagtcactcatctcagaatgtccccaccaatccccgccacagcaggcgcctcgggtcccagatgtctgcagccctcagcagctgcagaccgcccctcaccaacccagagaacctgctttactttgcccagggacttcctccccatgtgaacatggggaacttcgggccctgcctggagtccttgaccgctctctgtgggccccacccactctgtcctgggaaatgaagaagcatcttccttaggtctgccctgcttgcaaatccactagcaccgaccccaccacctggttccggctctgcacgctttggggtgtggatgtcgagaggcaccacggcctcacccaggcatctgctttactctggaccataggaaacaagaccgtttggaggtttcatcaggattttgggtttttcacatttcacgctaaggagtagtggccctgacttccggtcggctggccagctgactccctagggccttcagacgtgtatgcaaatgagtgatggataaggatgagtcttggagttgcgggcagcctggagactcgtggacttaccgcctggaggcaggcccgggaaggctgctgtttactcatcgggcagccacgtgctctctggaggaagtgatagtttctgaaaccgctcagatgttttggggaaagttggagaagccgtggccttgcgagaggtggttacaccagaacctggacattggccagaagaagcttaagtgggcagacactgtttgcccagtgtttgtgcaaggatggagtgggtgtctctgcatcacccacagccgcagctgtaaggcacgctggaaggcacacgcctgccaggcagggcagtctggcgcccatgatgggagggattgacatgtttcaacaaaataatgcacttccttacctagtggcccttcacacaacttttgaatctctaaaaatccataaaatccttaaagaactgtaagg

SEQ ID NO: 1421 - protein, 585 aa, Homo sapiens
MRVLLAALGLLFLGALRAFPQDRPFEDTCHGNPSHYYDKAVRRCCYRCPMGLFPTQQCPQRPTDCRKQCEPDYYLDEADRCTACVTCSRDDLVEKTPCAWNSSRVCECRPGMFCSTSAVNSCARCFFHSVCPAGMIVKFPGTAQKNTVCEPDGVSPACDENCKEPSSGTIPQAKPTPVSPATSSASTMPVRGGTRLAQEAASKLTRAPDSPSSVGRPSSDPGLSPTQPCPEGSGDCRKQCEPDYYLDEAGRCTACVSCSRDDLVEKTPCAWNSSRTCECRPGMICATSATNSCARCVPYPICAAETVTKPQDMAEKDTTFEAPPLGTQPDCNPTPENGEAPASTSPTQSLLVDSQASKTLPIPTSAPVSSTGKPVLDAGPVLFWVILVLVVVVGSSAFLLCHRRACRKRIRQKLHLCYPVQTSQPKLELVDSRPRRSSTQLRSGASVTEPVAEERGLMSQPLMCHSVGAAYLESLPLQDDAGGPSSPRDLPEPRVSTEHTNNKIEKIYIMKADTVIVGTVKAELPEGRGLAGPAEPELEEELEADHTPHYPEQETEPPLGSCSDVMLSVEEEGKEDPLPTAASGK

SEQ ID NO: 1422 - DNA, 63529 bp, Mus musculus
  misc_feature (1)...(63529): n = A,T,C or G
ctcttcattttttgcttcttttttggttttgttttgtttttaattcgcttccagtgtattaaaactgggctgagagagcattactcagtgtccttcagctattccagaattctccagctaagatgtttgtccttcagcctcttggtgttgaatgtaagaatggaaagcataaatatccctagaagtgaagtaaacatcttataagatctgttgaaaggaaatggcatatgttggtattctcggttgattggcaatgcatgtatagagtagctaatgtgcagagttagtacttgggcaataaaggggttaatttgactaaatcagtgagtactgagcactaaatcagtgagcactgagcactaaatcagtgagcactgagcactaaatcagtgagtacactgtttattataggcagaatcagggcatccttttctcgtgtccataagctgattttccacacaggatcattctctcactcaacccacagtccacctggggttccacttccaaagtcaagctataggagttgctcgaatttaaagcacacactagggatggactgggtgataggctcggaagtgggctcaaaggcaacgctagggttttaattactacaatgaggcgccaggtgtgcgcatggatgtgtgacagtgttctgctgcaaggtgatagatacagtgaggaagaacagacacctatgtccatcctacaggcttgaatcccagtacccattctctaccagtgactagtaagccagtctttctctcacagtagtctgggtcacatgtacagcctgtgttttgaactcgttatagatctgaatgagctaacatttataaagcttctgttctcaacatttttttttcttgtgggagtaatgggcttcccaaacttgggcctgggatgaatttcccttcctccgtctttctcagttcagcaagcaacctctctatcaacccgtctgctcacatcatcgctatcctccccactgcgcaagcccagatcacagcggctgcctctgacgctaaatatctcttttagcagcccgtcctagtagctacacccagggtttaatcttatctgccgctgctaacccatttcaaaacaccatcatctctggtctggatccaaatgccacagactcttaaatgatcttgctagctgcttctacttctggggtcctttctattgcttttcagcaagggctctaataaaattcaagcccgtaggtgtaactttcttatatatgtgtctgcttggcacccactgccaacacacagtcagcagcattcctgttcatacacacatgcacgcacctggagcctcactgtagcagctaaaatcccagagttacctttgaccacagatctgagcctatcgctcagcccctgcgcttttcttctggaatcctggcaccagggtcctctagttgccctttgacgctccttgaacatatctggcttactcctgccttaagtgagacctttcacctgctctgtctgtgttatgtggctacctcactttcagataataaccttccccatgagaccctcctcagtccgctaggcccatagcaatcttccaattccagatccatgccctgtttaattggtcttctggccccccagcactgttccacctgtgtaatggattacttaatgagtatgtctattccatgtctgcttctattagactgcaggactatttttagttcttggatacctgctacttataacagctcattgttgcgagctgacctgcggctcacaagaaacggggtacacccgggaggcagactggagctgaaagagagagaaatagacggtcgagagaaaaatggagctaagtcaaggttcctgatcaaagctcaaatgtaaatagtaaatgtgattataaaggggtggggggcattcccaccaatccattcttggtgcctggaaccagctgcaggtgtagtctctggaatatctcaggggcctctcagcaggtagcaacgtcttgaaagagaacagcaacaatagagccatctaggtaggaaggctccaccctaggtattctccttagtggcagcaaggtcaaagtctggatcagcctgcttcgaggctgggggaggctacatgtcataagttaaactctcaataaacatttaatgagtaagtggatgattgaggaaatataagaaaaaaaattgccgtgatgtatgatatttgacttagatttatggtctagtactcagcccaatgccaggaactaggtgttgagaaagggcttcctcctataggcattgcctggtgccagcctcatgctgcatattgtctaggtactgggggcataatgtacttgtgatagttgatgaaccaaggcaagcagtgtactgtcctagaggaggagagctgcaggggcaggatggaggagaggctccacccattcctggagacttgacccaggaggaggtatatgtgcagcaagcctgggaagggaaaagattacataaggagggcactcatgttcaaggagctcctgaagagtgagtctgggttcttgtgtcacagagaggagatgggccccgtcatttccttcctttccttcttccaacccctcctaccaccatcccaccccactctgtcccagattcatagcctctttcttcttcttcttcttcttcttcttcttcttcttcttcttcttcttcttnnnnnnnnnnnnnnnnnnnnnnnnnnnnnnnnnnnnnnnnnnnnnnnnnnnnnnnnnnnnnnnnnnnnnnnnnnnnnnnnnnnnnnnnnnnnnnnnnnnnnnnnnnnnnnnnnnnnnnnnnnnnnnnnnnnnnnnnnnnnnnnnnnnnnnnnnnnnnnnnnnnnnnnnnnnnnnnnnnnnnnnnnnnnnnnnnnnnnnnnnnnnnnnnnnacacacacacacacacacacacacaaatatatataagtacaacctgctgagatggtttagtgttccttgtatgtatgatttcaagctgatcgatttatattgtagagccaggtaggggttcctccctggggaaaattaacttgccctctcccagcagttattagctgcctgtagctttgtctaagggtagatccccatgagatttcttccttccatatctcgtctatcagtgttgtcgttgttcaggtcttgtttaggcggccatattgttacagtatcataagtatttgcttccctgtgatttctaagagacacaatttcataacagacttaacagcccttgggcttcataactacctttgaacctaccaaagattaaacaacaacaacaacaacaacaacaacaacaacaacaacaaggctaaacagaaagatataaaaaatgttaacaggaattgtgtatgggccattctagaagcacccccagatccacaagattgcttaaggctgtgtttgaacacccatctctttcgtctacataccttgcttgttatttacaccctaatgtagtaccctgtcttctctaagcctttcttaaagctgctcagacctactggcatccctctggtcagacatgtagctgctgctactatctgagctcacttttcaaacttgtgttggagggagtccctagcaaaggaattctacaaagcccaaagattcctttaatttcattgtacagaagaggaatgtgtgcttcagagcagactcatgctcttttggaaaggccaagccctcctacctggccacaaagcctatgcttttcactgtgtgtcccaagatcaaggcccctttatttctgtgctctcggcacctaacatagtggcttgcacatggtgggtcctcaatatctgtcaaataaatgaacaaatgaatcaaagctatcatgcactatgctttgtgtctcagtatgttaactgtgtcccaatacgtccataatcacaggactgtgtccattttaggtgtgtagctttctctcgtgtcagcctcacttttgtctgattagacatcgcatgtcaactatttctcaaaagaaaggcgtagggaaccagccccctagtcatatcgtagcagtatgctctgtttgaaagagatgagcagttgatgtagttttcttctctaagaatatatcaatctcagatatggtagctgggcatcttttagaaaaataaaatgcaaatggagagagctcacaaaccaagtgactgcagaagtcaaaggtggcaggcttcgttttggattcattttctgtgtttgttatatttatcagaaataggaacaaaaagcccaagtttcctcaactcactgaagattaataacaagaaatgaagacagcaaaaagagcaggtttactcatgtgaatgccaggaaatccagtctagatatcatgccacttggtacaatgttacaatgtttttggctggtgatatctttccaaggtaatcaggtaaccaataggacatggcatgctataatgaagatctgtctatgtatgtgtggatgcatgtgtatatgattatatacaagtaaatatgtatatatgtaaatgtgtgtcttatttgttcattaacataagaggaaaccagcgaaggaaaaagtcattttttatgtttaccagtttgctccatgtgtattgatcatatttattgtcaaaagcaaatacatagggctagatagaatagtgcttgaaagaatctgaatttcgtaccagatcctaccatgggtggctcacaacctcttttaacttcagcttcagagaatctaatgctctcttcttaacctccgggggctcttgaacacaccttgtacatataaacctacataggctcacacacatacagataaacaaaaagtgaacatgtctttgaaaaagttaacaatactcttttaaaagggatggttgggggagagagtgaggctcgttacacagtaattgtatttgaactttgcccttacagataacatgaaaagaaacaccgggcaaaggggtaaaagaaagtgggagaacagcacagggtcagagataagggaggcaaacttgaggcaaagtaggagcagcacttcatgctccattttcaaatctatagttcagatgtgacatgtgtaaccctccactcatcggaaagtctagataccgggagtaaactgggggagctgtgcatctattcgcctaacaggcacttaaggactttatgttaaatttcagaatacaaagaggaaaaaaaatcaactgttaccaaccacaccctaagcaaatactcggccttatgagaaggaagcctagaagacgttctgcaaagttgtgtttggtggctaggtagttcattcccaagcctgtgagatctgccttgtctcaggacatctgctggcatctgtagtgttcagccacgagagggtacaacttgaaggcctgctgtgacggttaatatcgactctggaatcatctaggagacatgtcattggcatgttttcggaagatttttctagattgagctagttgaagtagaaagactaatcataagtaaggataatatggataaatatcccaaccattctatcatttgggaaccctagtctaaataaaaagaatgtgaactgaacgatagttttcattgctctaagcttcctgaccaaagaccagctctctcatgctccctccatatcgcctctgccacggtggacaagactaatgttgagtttgacctgtgaagtcacggaaggataaatgtcctgggctcttataatcctgcagtcccattagaatcatggcagcaataacttgtgtcttttcactgttttttatctttcttttgtgctggaggatttaggagccatggtctattatttaaatctatccttgctcaaatttcagtttggtgtttacccagtgttaaggataacaggacttcatgacaactcccataattcttaggtctaagccctaaacttcatgtctcaaaaggcagctgtattagaagatagcccagttacctgtatagaataattaaactgagaccatggagggagggaaggctcaaatccatcacctggtggtttcatacaaactggaaattagatcgcagactgttacagacatacctgctcagcgaataaagacgaagagaagggcagactgaaagccgagtggacaggcctcagaacgagccacccatgcagaaaccttgatcctgaacatccagtagtgcaagacaatacatttcttttgcttaagacacccagtgtgtgtgatactgtgctatggcatctccaacagactggctgactgagcttagacctttgtccattttcttttgttgttgttgttttgttttgttttttgtttttgtctaggcagtgggtgtggttgcacaaacgggggtggggttgggggtggggcgggagggggcggggttcactaactggcctttctttgaacttttaaccatttaatgacaccctgaagacttgtctactccccagcctgactagtagtctccatcagtgttccaaacagttcctcacaggagtgttctctttctacttcatgaaagaagcaatcaggagacaacttccttgtcaaaacccccacccttgcatattctccacctctttttgtaaggagctggagcttcagcccacatccccaccgtgcctcagcttcctctccccatctcctgcatttgtcaagtgttactgtgtgagtcatcttgtcagcctccaaaagtcctgtgagaagtctggtctcagaacaggatgctgtttcctgactcccaggctattgttactttctcattgttgaggaaaaaatatccaacgtgacaactgaaaagaaggaaatttcactttggttcaggttttagaggatttggtccatggtctcttggcttcatggtttttttgtttgtttgtttgttttggttttttttggtttttgtttttggtttttcaagacagggtttctctgtgtagccctgactgtcctagaactcactttgtagaccaggctggcctcgaactcagaaatccgcctgcctctgcctcccgagtgctgggattaaaggcatgcgccaccacgcccggcaacttcatgcttttggtagagcattatatggcatagaggaatagttcacatcatgaccaaccagaaggcagagaactggacaggaagttgtcagggatagcacagtacagcatcaaagacttttaacgagtaacccaagtcctccatcttggcccatcctcctaaattcataaaccttctaaaatagttccccaacctgaggtccaagagttctaaaatcatgatcctatagagaattttacatatccacatcataatgcccagcatcttccaattgcatccttatttctctgttccttttgacactaagcaaacaaacaaacaaacaaacaaaatggctccctttttcaacacaactgcaccctaacttactaagagaaccttcaaaccttcacttgaacctgcctgctggactgtgtccttctcattccctgaaaatctgaaaatgttccctctcgagaacggaaagaagcgtttaagactttgctgttcttgcagaaaactggacttaggccctagcatccgcatcaggcagcttacagccatttacgacttcaattctgagggacctgatgccctattttggcccatatggccatcccacataagagcctacacatacatgtgcaaataatatgttttttttaattaattaattaattttttgttagttaagaacttctttctttttcatgagtcacccttccaagtttcctttgctgggattttcacacttttctgactcttacgtcaagaatgttccccaaggttttaaaacttctccattccatctgttacatagtctctctgtgacatgacgaccctctttacaaactgtgctgaaacttcatgtgccaggtcatttaaggtcactgatcttaaacaggttaaaacagaattctgtgctgataaaatggcctgacctggttcagtcttctctgctgtcagacctgatgaccccagtttaatgccttggacacacatggcagnnnnnnnnnnnnnnnnnnnnccccagtttaatgccttggacacacatggcagagagagagaaaggacccctcaaaggtgtccttggtcctccattcatgtcctgtggcatatattcacacacacacacacacacacacacacacacacacacacacacacagagagagagagagagacagagagagagagagagagagagagagagagagaaccaaagaactgcaggaacaaaaatgaaggtccagttaacaggcccagctcaaggggaggctccaaggcctgacattattactgatgctatggagtgcttacaaacaagggcctaacatgactgcctttcgaaaggcccaacaagcagctgaatgagtccgatgcagatatttacacccaatcaatgcacagaagctggtgacccctgtggttaaattagggaaaagctagaagaagctgaggaggagggcaaccctataagaacagcagtctcaactaacctggaccttcgagaccactcagacactgagccaccaaccaggcagcacacaccagctgatatgaggtccctaacacatatacagcagaagagtgctgggtctggactcagtcagagaagatgcacctaaccctctagatacttggggccccagggagtgaggaagtctggtggggtggggggtagggataggggtggggacatcctcttggagagggggtggggaaggaggaaggtgagggaatgtaccaggagggagatgaagtctggactgtaaaaaaagattaaagaatgtatttttaaaaaagaaaaagaaaacacaggaaaaaaaagaaagagagggagagaggcacacaaaatgaataagcaaaatgacagcaaacgtttaaaaaaaaatgaaatgcacagtctaaaaaagtcctcctgacatacggagctgcagagacttactctcctgctgccttcggaaggattctctgtcatcctgtagtatagctgcaatgctgctttcccgcatcttaaaacagaacaaggggctttcctgccccagctcttgcatccagtaccctctgcctgaaaagtgtcccgtgaaaatcctgtgtcatgatccattctgtgacaagtctctgtttaagcagaagagtgcggggtcttcttgggaaggagagccaggaagagcctttgtatttggggttcccatgtgggatgaagtattactgcacatgagatgggttgcgagcatcctatcaactctaaaatcctacctttgtcaaccccctagagtaagcagcaataacttacatttattgagtaatcggttgttatgtcttagggattatgctaaacacctaggaggtattaagccatctaatcaaagcaagctttgatgtaatgaatgtgaggctctgctcacatctatctagttcagagaggtaagtttatcttaacagcactttaccatctggggctgggtttgaactgatacctcctgagaagaggggcagagtaaagctgagactttaaagatacttgggcaggatttttatcaaagctcagaagtagaggtaagcaggccattcattgccaggcatttgggtgaacagagagagagagggagggaggagagggagagggagaataattttacacacacacatacacacacacctgagcataagtagcaaacatgtcaagtgtcaaggttgttggtcaggagtattctgaagctgttgtttgtgtaccagcagaggctaaagtgctgtcttctcttggagagagaggttctggtcagtttgctctggagtctggaagtaagcagttggagtgcctgttgacaacccaagagccttattagtccagtcacctccgtggaactttggagcaggagtagggggtgggaaaggaagcagataaaagcaagtgaaaaaaaggaggaggggcaggctctgacccagtcagccctgtgctctcttcctgcctagcctgggccagtcttcgggagcccaatggctaactatgaatttagccaggtgtctggggacagacctggctgccgcctctctaggaaagcccagatcggtctcggagtgggtctcctggtcctgatcgccttggtagtagggatcgtggtcatacttctgaggccgcgctcactcctggtgtggactggagagcctaccacgaagcacttttctgacatcttcctgggacgctgcctcatctacactcagatcctccggccggagatgaggtgagttggcttctgaggctcactctaggcacagtgcgcagcgggacaccggggaagcaggctgtgactcagctggagctctcgcggcgggggggaatcttccagattgtcccaaacaaagaatcttgtgttgtggatcagctggaagccgaagggcagtgctgagcggaaggtctcctgttcaagttaccagaacaccgcctgcacaatgcctcctccgttttggcagtgtctgtgatgggggcgccgatccttgctgagctctgcaaagatgctcgcttcccacagagggtcctgaactctgaaggaacccttagggctatctttggccacagccatgcttctgggacaaagattactctcaggcacaggaacttcacattgtcttttggcttgtggtttccatcagacaccgcccctgcccagaaagttaaggtcacaggcgacatttaactaggtggcttgctcagcttgctgtgggggtggaaggggccaggaggatttttgtgaattcaaggttaacaagggctgcacagcaacattgtaaattccaggacaagcttgggttacaaagagagacctgactcaaaataagttaattaattttaattaattacaacacaaagaaaacaaaaaacaagcccaaacagcatcctggtctttttttttttttgcacctgatcattaataaaaacaaaacaagacagactgtcaaaactgaaatattactcatcaggtaagcgaaatccacttggtgatcctgtgtagacccttgggaacatcatcttcattggtcaatagagtcagcccatagaaccccttccacccactacctgccccagagggaatgatttatgttgcttctccctggcatcattttaacgtagaactgatttctgaagtcaaacagaaagcccagcaggctgggaaggcacacgcagaaacccaacttcacattctgtcttcagatgcacacacttcccgggtgctcgaatgctcagtggtttgggtcctggtcttacttgaaaatgttggagtataaacactctcagggtcctgataaatattttgtttacagatgtttaaatgatattggttgttcagccattttgatagcttgtaaattttctgtgcttagcaaaccagatgcatggcactggcatgatgtgtgcttagcattaaccatgtggtgtagacggtaagcacttcttcaacctatccactcatgtgtatatgtgtgcattcagcaagaattaattatttgtgtttatcaaataataatcaatctaaaaataacaggattaactaataaaagtatatatatttactctgtgtgtgtacatgtgtgtgtgtgtgtgcacacacgctcgtaagtgcgtgagtgcctgttccacagtacacgtgcagaaatcatggaattcagttctttgcttccactctgtagcttctgggaatcaaattcagataattagaggtttggaagcaagcatccctacctgctagtctgtatcatttgcctaacatattactattgtgatgagcatcttttcagacatctcacacacacacacacacacacacacacacacacacacacacacacacactttatatgaatagattagtggcaggtacatctcatgtgtcaggcacttatgtcaggagctgaggtgcagctcagtgatagagctctggcctggtttacaaagtgccctgggttcaccctcagcatcgcagtagaggaatgagtggaacagaatcaaccaggacagaaggcaacgatacatagacggttgctattgatatctccattttatagataagaaaagggagtcaaaagctgaaccctgttgagccctgaagccagatcattggagctggaatcttggctctgttgcgacctcagaccccgccctcagtgtatctgcgctgtggtgtgttcccaccttgtaaaatgggaacgttaatggcagcactcggcatctagagtaaacgaagaggactaagatgaataatcttgtcatggtaaatgctcaaaatgttactgctgtgtaaatggagtgttgcagatacctctccacaatagcaaatataaaataagtacaggcgttcatgcattagaacattgttgtataattcagtcctccagtgctgaaagttacatcgtttcgaatcttgttcacctaacacttggtggtgatagggtctctcatattgctacacccaaatctaccttattttttatagcgtagatgtaaccatttccagtcatcaaaaatttaatttccaattttaaattacatatctctgttacatttaggggatgggaggattgccatagggcatgcatggaagttggttctttcttcccctatgtaggttctgggaatcaaactcaggtctttaggcttggcagcaatcacctttatttaaatgagacatcgtgctggcccattttctaatttttcaatcccattcattcattcattagatatttttgagcctctgctgggttccaggtgggtgatctggctactggtggcacaggaggggtagtgtcctgattcttgtccagctttcccttacagtaaacatcttcaacttataccttcatgtgtgcactggagcgttctgtatgacagactcccactgatagaatgagattgtacatgttttagttagggtttctattgctatgaagagataccacgagcacagcatatcttgtaaatgaaaatatttaattggggctgacttacagttcagaagttttagttcattatcatgatgatggcatacaggcagacatagtgatggagaaggagctgagagttctacatctggactgacatacaacaggaagacagacagacacttggcctgccttgagcatctaaaaaccacaaagcccactcacacacttcctccaataaggccacgcctactccaacaagaccacacctcctaatagtaccactctctatggacctttgggggccattttcactcaggtcaccacagtgcatattttgtttgagtggctttcaaattgcacatgtttctaaatcctctgtgaaatagttttattagttatttattaactctcatatcagtctacagggcccacttctccatgatatgaccattattaaatgtcttaaatctttttaaattatgagaaagatggaaagataacatataaccattccctgtttgccagcaagtcttctgtctggcttttgtccatttaaactttgttcagatcttcactctttctgttgagttaattacatatgtgattttgggttgttcatattctagataatatttatacacacagacacaaagtatctcacagctacatcactaaggcctccaccccaaggacacattttactgacaacaccctgagtttcattattatattggggctacttcttattttgatacccttactaagaagcaccgagaaagccagttttattttcaaacctagtgcactggaaatgtttactctctgttctgcactatgaatcaggaattctttcctctctgggtctgcactttctcttgcacagctagaaagcaaagaagcgaccctcagcttctgcactaagagtttgagccacagctttgggttcctagggggagttatgcatcttccctttggcagttgacaagagttacatcttacatcacttctgcaaggggctgtgtttcttccagcctccaatgaccacttcctgtgtgtccatcaagtcagcacgaacagtccctccttgaggcctttgttcttctgcctgacacccaggtctgtactgatgtcacaggggtctccacacaaattgaaatagcatgtgtgtgtgtgtgtgtgtgtgtaggtgttggaacaggtttgtgcactcattgatgctggcaatccaaaacagaaaacaaataagcaaacaaacaaacaaacaaacaaaactcaaaaccctgcagtctaagccaacatgcagctttagtctgaaggaagtgtgacaggattcccttccttcctggaactatagacttttccttaaggcttgaaacaatgcggcccactcacaattatggagggtgctggccttcctaccaggcctatgatctaatgttattttcatgtcctagaacatcttccagcatcaggtagatatttctgagcacatatctgtgtgctgttgcctcatgaagatgatactgccaacgactcatctgtttatatatatatatatattttttttttccgagacagggtttctctgtatagccctggctgtcctggaactcactttgtaaaccaggctggcctcaaactcagaaatcgcttgcctctgcctcccaagtgctgggattaaaggcgtttgccaccacacccagctaagatttttttttaatgctgaatcttgttgctgggtaccattttctaagtctctataacaaactactactgcccagttcagtaatttgcattgaggatcatctaggttgtgtgattctgcaattggacaggggtcgtttggaggccaacttgactccatgtcatctgggtctgccatcacccaggccatcgttcaacatgccatgctttcatgaatgacatcttggcttagcagagaagttgtgtgtctctttctctttgtattgcctctgcatggtcccctccacaaggtccttccctattagaccagggactcttcatggttttcacactctaatagtgcattcagctgggtcctcctaaaactttaggctcatgagggcttcacctctacaggtcaccaagccaaggccaactcagactcaacagctagagaaactctacttctcaatgggtgggaggcataagacattttgtgggtaccctcagctcttcatgttttgcatgggagcatccttgtttatgttcctacaagccttttgttataattgttctgttgcctctgttattgcccttaacaacttcccagaactagatttataatgaaaaaaaattgcatgcaatttatgttgctgagtttgaggatcattttatagtggtgtgatggtttatatagccttggaccagggagtggcaccatctgaaggtgtggccttgttggaataggtgtgacctggttagaatgggtgtgtcactgtgggtgtgggtataagatcctcaccctagttgcctggaagtcagtcttccactagcagcctttgcatgaagacatagaactctcagttcctcctgcaccatgcctgcctggatactgacatgctcccaccttgatgataatggactgaacctctgaacctgtaagccatccccaattaaatgttgttttttataagacttgccttggtcatggtgtttgttcacagcagtaaaaccgtaactaagacaagtggtatatatttagcactcagattaatgcttaaactataataagttctaaatatttagttgaatcacataaatagcatatgagcatatatatatatatgtatatataaaacaaataatgtaaacaaagccataataaatataccttcccaggattaccacatttaaatctatcaatctgtgtttaagttatttagactttgtgtgtgtgggggtggggtggtggtagtttctttataagctgtataattttgtggggggaggggcaaggatgcagttgctgtaaccaaggcaacttatgaaagaaagcaattaatttgggacttgtcttttttcttagttagggttgtgaagagacaatacaacgacagcaactcttacaaaggaaaggtttaattagggctgacttacaggttcagaggtttagtccatttagtcatggtgagaagcatagagacatggtgctagagcagcagctgacccacaggtagaagggggagggggctggcatggaattttggaacaacaatcctgaagacacacattttccaacaaggccacaccttcaacaaggctacacccccaatcctttccaaaaggttcatcaactggatcctaaggggtccatttgcatccaagccaccacagggatcacaggtttagaggcttagagtccatgatcatcatggtgaggttcatggtagcaggaatgtaggcatggtgctggagcagtagctgagagctcacatctttagacacaaccattaggtagagagaaaaagaacattggtaattgactaagtttttttttttttttaagttcttccaacaaggccacccatcttaatccttttcaaacagttctaccgaggaccaagtattcaaacatacaattctatggaggccattctcattcaaactaccacaaacttgcttaataggcaagattaactagccggtgagccttggggatctacctgtctctgccttcctagcccatgcatgccaccgtactaggatttttaacaggagttctggaaatagaactcgggtctttatgcttgcaaggtcagtactttaccagtggagccatcttctcaacactgcagatcttattatttattttttttaagatttatttatttattatgtatatagcattctgcatgcatatgtgtctgcaggccagaagagggcaccagatctcattatagatggttatgagccaccatgtggttgctgggaattgaactcagaacctctggaagaccagccagtgctcttaacctctgagccatctctccagcccttgcagatcttatttttaaaacttaccctcataaaactcatctgctggcctctcttttgctttctgtgctgggtgtcagggttaatttacactgtcaacttgatcgtatttaggattatttatagcataagtgagatgcacctttaactttcttttgcagaatttctaaagagctttaactaagaaggaagattaatctaaacacggggtgggggcaccaacctgtgagctgggatcctgggctagacaaaaattggggagggaggaaaaaacagtcatgtattggcattttccgtcctctcactgtacttcttggacagggtgacagattaagtcacttctgtcgccatgctttctccgtcatggtggattgtgagccaaaatagacccttcatttctttcttcctcccctcccccccttaaattggtttatatgaactgtgatggttaatattgactatcaacttgatagggtctggaatcacctaggagacaaatctctgggcatgtctatgaggaagttttcagattgggttcatcaaagtaggaagactcaacataagtgtgcatagtatcgttccaagaactttggttttggctgagtaaaaaggagaaatgcaggcaagtagccacattaatctctctctctctctctctctctctctctctctctcctgcttttgccaccttggcagactgtgactcaaactgtgagctataagaaagctttccctttaaatatggcttttgttcagtgttttcgaagggaaagaaacatcagttatttgttctcagtgacaagaacagctactaacatgtggggtttgaacctggggtcttggctgagccacactccctgtctcattcgaagatggatatcaagcttttccttgaagatgaaactcaactctcttaagttgaaccagcagcattaaatgtagaatactcctgaattaacgcccttgtttcctcagtcttgaaggctacatttacaagctatcttctgactaagacagccctagatatgctgagagacacacatccaagatttaccacagggtgtacaggatgtcagcacttacagtatctcttggctctgtgggaaagtgtgacactcaggactcagggtatgtgcagaggtagaagagggtctgagggtgagacagagatcaagccatgaaggaagatgggtctctagagagaggtctggttggtatgacttaagttccgtgactctcccatcttggtgaagatcagcttcctctatagatgatggggatttcagccatggatgtgagttacagatgctggaggtccagctgagagtacagagatataaacaagtatgtacatgaaagatctcttcatcccagccacaggagatgttgacagccagagaggaggggttctaattcacctcaccacccttagttaactcatatgctgttcatcatattctggtctctttgttgaaaaaaaaaaagctttttgaatggaacacacttatgttaatataaaggtggctggacccaaatgtaaatgatgaaagagtcagagaatagtctctattcttccgcttcacttctttctcacattggctggattttctgatccctttgttttcaggttacatgtttttaaaattctcctttgcttcttcctcttcaaactttctgggtattttaggaggtcaagtctgttcattttacttccttctgactcctactttgatagtctcagcattttacttgagacttgatgaaagcagaaaattcgtacagagagtaaagacttcccgatgttggatggaactggcaaaccagtgaactcaaataaacccgttccctttacataagatcatgtcaggcatttcatgatagtgacagaaaactgattaatcaggaacaaggatagaacaactgccagattcaacagcctggctcaccagaatttgaaaacatttttttccaagtctaagttttcataagctaagcgcacatagcacgtagacctacacatattggagatttatttattcatttgtgtcaggcttgaaagtgaccagatgaaatgtaactagaacagactcgaagcccgagagactagctttaaataattgtttatgaggatgtcagtaaagtgataaattcacttcaaaaatatttcgaggcacttgtatctgctggtactcaaaatgaatattagacttagatacattgacatgaactagttaacgttctatgaagagggcagtatgaagctgaaattttctgattgtgttgttattgcttagaaattatttgtatctctagcagacaaaaatgacacactatcctctaccttaaaaggttggagctataacctcagacgaaaaggaatgaaaaccatattctactgagtaaatttttttttgtaaatcttcccaacagtacctgccttagtctgttgctattcgtataataaagtacaagatgttggaaaatagatgaaggaaaaacaagtttagctcacaatttcagaagttcaagaaacttctggctccatcatagtatggcaggtggtagcaggatgctgagacctgtgaggagagcacttagacacaggaactaactcccaccttcagaataggactctgagagtgatgacaccttccattaggtcccaccattaaagatcctataacacccacctacatggtaggccaagcacaagcatggaaaacgttggggtatagacacagaccatatccaagctatgataacatctcagtatgacgctacacagaatgttgtctatggtgtgggtttaatttgggcccccttcaatgttttatgtattttgtaacatatttattcaggaatactatgtattcctatgtacctatagggagttgctcttaggaagcccaggactcccaggaaactgccaaaatttgtgtggttaattcttctaaaaaaaaaatcctgagttatttgcgtataatctttactttgtcattcatattttatatcttctctgtatttcttaaaatagataatatagcatacatgctacataaattgctattacatcatgtagtccagagaatgatagcaacttattctgaatattttcaatatgcagtggtttggactcacagatgtggcagccacatgcacaggggaccaactgtatgcctggcctcttgcaggtgggttctttcttaacagtgagcaaaacacacagaatccttctaatttcagcaacttgcattctctcaggccaaggaaaatatgaaacaaaacaagaacatatgctgtatagcaaatggtgggaagagctggggagaatgtggaagagggtttcaatcttcaattatgggagtaaaatgagaacaacttccctgcaaggtgacattttagtaatgtctagcctgtgtttgatcttccaggactttcctaaagacatattataactttggttagttctaatgtagagtcatattttacactgtaaagatgtatagtatgttttctttaacttattaccattttctctctatttacagatacctattagtatgtggaacagggtggctatttggcttaggattgcccaccgtctgatttggatggttacagtcttgtggtgctgtttatttttatgctttgatgagttgatttattactatgagatgtacgtgtatgatgtgtgtgagtgcccatgtacacggatacatacgtgtcatggcgcacgtgcagaggtcagttttcttctctgaccttcatgcggggtccatggaacagactcaggttgccaggcttggacagacagtgcctgacctgctgcttcctctcgctggcctctgtgctgctgtttaacatgctcctacagaagcagtgttccctagaaactgacagcctggttacagtagactagacttggggatggagcagggatacctcacagggggagctattcttccagcattacatcaaacgccccataatgtcacatggtcccacaacttgaaggttattagagttgagcactgcgtgcttgggacatctgttgttaagttccgcagtgacatttcatcccactagtttagcagcagttgatgatcctggacagcccttcttttttctttttctttttctttttcttttttcttttttgtttttttgtttttgtttttttgtttttgagacagggtttctttgtgtagccctagctgtcctggaactcattctgtagaccccggctggcctcaaactcagaaatacgcctgcctctgcctcccacgtgctggggttaaaggcgtgcaccacccctgcaaggcttcaaatgcccctcttctctacccatccccatcatctactggctctgtttctgtgaagagctccgacaaacacatttgccacctgactgataaaggatcaagaactaatcaacttttcttttctgaactccctttcagggcaaccagtaaagaatcccaccctgcttaaagaattaaagtcaatacataccaaaggactctttcagttaaaaataatgatttgctaatttccatggcattgatcaatcccgttcaggatcatcaactgctgctaaactagtgggatgaaatgtcactgcggaacttaacaacagatgtcccaagcacgcagtgctcaactctaataaccttcaagttgtgggaccatgtgacattatggggcgtttgatgtaatgctggaagaatagctccccctgtgaggtatccctgctccatccccaagtctagtctactgtaaccaggctgtcagtttctagggaacactgcttctgtaggagcatgttaaacagcagcacagaggccagcgagaggaagcagcaggtcaggcactgtctgtccaagcctggcaacctgagtctgttctcaggaaatgagtttgtcacatgagtatggtgactggaagtctcttagagccagagtaggcaacgctatgacactcagtctaggaccaaactagaggatccggctggctgctcatataaggcctgactccagggccatgcagctgggacctctgatatgcaagattccgggatagcacactctcagggcaagaaccaatccccagtcccaaacttcccgagtaactgtcctgcctttgagatgagcctgcctattatcctggagaagcctaggttctgttggtagagaaaaagcctagagagtgtgtcagtgctactcactgcaagttgacatgatgtttctggacttgggtggatagttcttgagaactctatttttaatattttatgttttgaaatcatgtgtatatgagtgtacatttgtacacatgagtccagtgccctcggagaccagaaacaagtgtcggagctccctgaagctacagttacaagcagttgtgagctgctggacatgggtgctgggaactaagctcaagtcctccagaagagcagtccatgttcttaactgctaaatcacgagtctagccgctagaagacacaggcgtttaaaggaaagacggacacgttatgacttccatttataacttcaatccagagcaaaagtgcaaggccatactgtccttaaattatgtttgtacctaatttgtcttatactgagaactttgatgatgatgatataactatgtgttttctttgtcgctggatgtgtgatatgtaattgttatatatttgtttatgcttattattattattgttaatacattctattctaagtgatgtaagctttcttcaaggttctttttaccttcagagacaggattcatgccactagtggtgagtattgagaatgctatgtcctggcatggtgctatataattaaagagaagatcatgctggctgtctcactgaaaagggatagtagtaagacaaacactcaactaagaaagccacccagagcctcttcagttaatgtctcttcagtccgctgcagtgccatgctactcgccttaaaccaatcctgtcagattcatcaacctgttgtccgttccctgccttcatctcacttgatcaatcagattcactagaaagaactgacttcacatcttccctttgaaatattctcttcccttcatctctctacactggatgcttcctaatttatagcctcacccaaaactttagcacccccaggactgacacaacccaacttcctaatgaaaaaaaatccctacttggatggcagtggacattacaaaactcatctgttcaaatacaaatccctggtgtctttctcaatttgttccattccgttctttccttatttgaaacagcagttcattttccagtaactcaactaaaaaatcttggtatcacttctctcttcttcttttttttttctctttcacacttcatatgcagtcacacattaaatcaaatgtgttctactctcaaaatctatgcaggctggtgtgggtgcacgtgaccatcccacattaagaaacaggaagatcgtggtttaaggtcatcctgggttatttggtgagtttgtcccccatctcaaatgtacccagagtctgtccacttcttaccacatctgccactatccaagtcacagtcatctttcatctgagttttttttctgggaagaacaaaattgggtaacagctgatataatatgcaaaatggaagaaatggacggggtgggattggaggggcagagccttttaagtaggcctgagaaatcaggcctccattacaattagcatctcaatatcaaatgtagcatttttcaacagtctcacacatagtcattaattatcaaaatgatcacttaatttccataagaaaagtagttctcattggtcacttacctaatttacttacctaacatttaagggaattatataactaatactactacgaagcataaacatttacaggaaggtagatactcatccaagtgggtgagagccaaagttcctgcctgtgtttcagatggtgtgtgaagacaacttcttttacagttgatagtgtatccacatgggaggaataaatataagcttgccctagattgctttctattgctagggtaaacactacagcccaaagcaacttggagaggaaaggatttattttgccaactctgtgtgaagtaggacacagttttctggtaaaaaatgactccagaactgattatctacggtgcttgttctttgagaagctacttagaatcaatcaggtcagaatatggaaacaatcagtcctctcaaaggagaagtggtgacaagaatagatttaaggtgttgagaaaaaaagaagccaaacaaaacaaaacaggaattggggtgaaagatgaagaatcgatctcctgtgcacatgtgctaggaagggtcagaaaggggaagatggctatattcatacactgatatgggtggaaataaagagaccattttaccgtaatgcccactctggagaaggccatgaagaaacaggagagtgacacctgaagtcagaaatatggagagtcacccaagcaagagaattccttttaatcactaattttcttccaacaatgaagagcaagtgtgtccaatatagaacacttgcttaaaatttaaaaatacaaaatgaaggaccaaataatccccagttagactcctgaactgtagacttaaatttttttttttaaatccacaaagttgaaagtgatcaacaagtgcaatctatacctgcttgaacaggcagctttggcattaagtagttttaagaacacagttaaagggctggcgagatggcttagaggttaagagcactgttcttctagaggttctgagtttaattcccagcaacgacatggtggctcacaaccatctgtaacggggtctgatgccctcttctggtgtgtctgacagctgtggtgtgttcatatacctaaaaataaattgatctttaaaaaaaccaaacaaacagaatacagttagaatattttgtaatggaaaaatttttgaattgctatggtgttttctccttctcaccagaatgtgtcagatgtggtgtacacaccgggagacagtgacctccatatattgtcctgatatgttttctgttgctatgataaacaccatgaccaaaaccaactcagagaccaaaagggaatatttgatcctccagctcacagtccattactgaaggaggcaggaattagcagagttacaccaaggcagaaaatgaagtggaaccgtcgaggaacgccgcttcctggtttgctccctcggcttgctctgctgtcttatgtagcctaggcttgcctgccaagggtggcgctggcaaccatgatctgggccctttcacatctaccagcaatcaagaaattgtcccacagatgtgcccatagagcagtctaatagacatagttccacacttaacctcccctcttccaggtatgtgtagcttgttgacaaaactatatgaccaagttgacaaaaactaaccagcacagtgatccaaaaatctattgaaattattagtctaatagcaggaaagactcaagatatacacttccgtgggtactaccctctccttggcactgttgaactaactctctctctctctctctctctctctctctctctctttctctctctctctctctcacacacacacacacacacacacacacacacgtctctctgtctctgctgtctctgtctctctttcactttcctttctcattatatctatcaaccaaatattaagaagtaatttctgtctttggcacttatatatgaaattcatagcaaaactgatcatcttggttcctgggagtaagctgaattacccatcagtgtatggaagttggtgaacactccttgggagttcttcaaggacagaggcagaaaacagatggtagagatttaaagtcacaaggggatgccgaggcttaggtaaggacagtagattgtatctggaaactgccttcttgctgtaaccctgttttcaaaggcattctggactgtaggggtctgaacacattcacagctgagaaccatgtactctgcacttgccaagttaccttttcctcattcttcatattccaaggggttcttctccatcctcatttccccaacctcaagcagtatcttttgtcagtctcttaagggtaagaaagttacataatggacatttaaagcacagtgagatgtccctgaacgttaggggcatctcttattgttcaataatacaatagagagaaatctgccatctgtgtcacagctttctttctgtgtttaaagaagtagccagttacagaaaaatggttacaaaaaacacctcccttaacttctttccccttttctcagagagtaatcctgccctttgtttctctcacagctttctagaagggttcccagcacaaggcagcatatgatcttgttttcaacgtcttttctcacttccctattcctccccagttaacagtggttgcttcgatgagcacagctgggtctcactttcacagtcaatggacccacagttaatacatttactgtcctctagattcacacccagggacatttgtggtgttttcatatttgcaatatttcctaagtaatgcttaagataaagtgtgtgtgtgtgtgtatatagaattctaagagcaaatttgctaagttaaaacatatattattttttattttgaaaaacccaaagccctatttctcttcacggggctgttctcttctcaacacagggaggattcctgtctcctcacaccctgcctctttcaggggcccctgtcttgctgttcagcactctggtaagagaaagtactggctccagctgttcttaatttgtgctccttgcacactttcactctgtggaattaactattctgccttttgttttttttcctggtgaagtatatcttacagtctggatggcatttatctatgtacaaatatgagccatagaatgtaccacagttgcttccactggcttcttagtttgctaaaactaaaacagacacttactaaacaccgcttcaacaatagaaatgtacttcctggcagtcctgaattctgggagtcaaaagtgaagatggctgcaggggtgacttctggaggctgtgaggaactctgttccatgcccttttaccagctcttgggatctttagacattcttgcatgggttcaaggagttctgttagtcttcatattatatattgtattctctctgtacatacatgtttgtctttatagccaacttttcctttctgtctctgtctctgtctctgtctccgtctctctgtgtgtgtatgcatatgtatgtgcatgtacctgtgaatgtctgtgtatgtattgtgtgtgtctgtttgtgctcgtgtccgtatgtgtgtgtgcatgtgctcgagagggcgtttgtgtctatatggccagagaacaacactggttgtctttctctcttgctcttcattttattgtgaagcaagggctctcactgaacctgggattttggctagactggctggccgctgagggctgtgggcttcatctctgctccccacattcagctgtgcctaacttttacgtgaatgctgaggacttgaactcaggtcctcaagctgacagcatgcactttacccactgagccgtctcctcagcctcagtctctcagccatatggaatgtggaactgtctcaatgacttcatataaagtcgatcatctacaaagatgggttttagcagtgtaaaaaattttcaagctaaagtataattacatcactttctttcctttcctcctttcccactaccatgatcttcctctaatattcatctccaattgacagcctctttggatgaattcacctcacccttgaatgagccccctaattgattacctaatacaaaatggtcattactgaaataatttagtcccaagccacactaaatgtgctcaacaggtatatataaagagagagagggagggagagagagagagagagagagagagagagaatattctgtgaatatcttatttccaaataagaatacaatcagagatagtggggtaaggtttgaacatcttggtgaggacgcagttcaacccaccacactgggtatgccaattaaatgttttggagctatattcaatagagctcaaaaaaagactttaagtgagagatgtataatatctatataatgagatacccagaagtgtggtgacttcagggttagcttagcggatcagtgagagtcaggctctttgtttctagtctttcatctcctggggcatcttttatcctcaagcctttgtcaaaaaatggctgcagcaattctaaccactgtgtgctcacataatcacatctcgagtaaaaaagatcaggaggactggcattcattttgggactcctctcattccataacaatgtctttccaggaatcctttcttcactcttctgcattctccttaaatttcgttggccggaagtggcctgcatggctaacccgaggcgtaaggaggtggttcaagaagtgtttgatattctgagatcttctgtggagacatgttatccaaacagagaagaggggtgaagacatttgtttggttagggccagctgtgctgggcatgtcacatgtggacacagcactgaaatgtactctccacacctgcagagtccagtctccttgcacgatctctccgagtgctctctggaccggtgacactggctttggctccatttccctgatcgcttaggccagctgatcatcttctatccattcactggtcattatgacttcttctgctttgcccgtcttactactgaacagtcttttttgtttatatgttcaacttcctattctcttgtcaataatatggttacaagcatgttctctcaatctgtgccttcattcttgactttatggaaccctttatcctgagaatctaaatgtcattgaaatttatattttctcttatgtgtgtgcctttgtgccttgcttgggaatgtatgtatatatatgacattatgaaaagaaggggtttaaaagctgtaactactacttttcatagccaagtcttttaactatctggaatgcgtccctgcgtatggtgaaactaggaaaatgattttatccccaccctcagctgtgtaatcagcaacatgaatgctatttattgaatatttgaccttaacctagggttagtaatgccacttccactgtccatttaagttccgattccagttcccatgtaagaaggtagatgtggttgcttgtgatctgctgtccatcagaagtcagaccgaggagtgggaaacagagcgtgggacaaataggttccacaggactctgctctggaatgccgggagtattacagctccttaaaagagggtaaagccgtacggcagtctgtgtggggcaggtagcaggggcagagagcccttgaaagcggcaggagtgctgatgtaagcctctgtgggcagcgagagcctagatgccagtccaagatccaataatatgatgaatgcttctggagagagagctcttcccaagtgttacagctcagtaaagacagccagtctcagatgatcctcggggaaaataacttgtgcattttcttccatgtggagagggactataagaagcttgggggagtgggacaggatttgagaggtgggcgtaaatgtttcctattggctcagtttgagacgttggtgatgctctcattgcatggggaaggactcctggtgctgcgttatgtgactgactgcccatcttcctctcagataggtgttgtgattatgtattccagagcaggttccgagacatggaggaagcagctctgctcccgctgtctcagatctcggagcatcgcggggtgtaagcacaccccaccgcaccagttcttacgcccttctgctggcacggcccacttgccctacagttgcatgtacccataccggagctgaggggagtagaatctggggttcactgaggtttgctggtcaaaagcttagctctatctagttcagtgagagatcctgtctcaaaggaataaagtacagagtgacagagtgggacacctctgtgtatgtacaaaagtgcactcatcagcacatgggtatgggtatacacttcacacacccatatgccacccttgcatatgcacacacacatacatacctaatttattataaaagttggtttctttttattactaagtcaactgtgtctgtatatgataatttgtttatccatttactggttgatggacatttggcttatattcacattttgaatatgatgaatgaaggtactctggacattaatgtataaattaatatatggtcatatagtttcatttggaaaggcgggggttatccagaaataaagaactggactaaatggcagatggatgcctgacttttggagaaaccacaaaactgttttgaatagtgctggagataatttgaaaggtaaggatatagttttaaagaataattttttggaagggatagacatggtttgagtatattgcccaagagcttgtcctcaaagcttagccctcattgtggtgacatagtgattggaaaacctttaggagacagggcctggtggaaaagaacaaagccattaggatacgatacacagaagagtgcccatctcctaccaagggttagttcctgaagtgaagttataaaaagaacaagactcagggttggcatgtagctgtgtctgtagaatgcttgcctaatatgtgctaagctgagggttgatctttagcacctcataaaacttgatgtggtggaatcccaaaatttgggagactgagacaggagaatcagaagttcaaaactgtcctcagctgcctaagtttacagccagcctgggctacatgaaagcttgcctcaaaagcaagaaaaaaagagaaaagagactttttctggacttgtttctcaggatgtgatctcttccacatagatcagatcaagttatactgtactggtgcagtatcagtgtattctataaatttgcattcgtgacattgggaatttttaagggaaaatgataaataggttttggagaacacaggaatttgaagagattacaaatgactgacacagaattgctaaacctcaactttttgatgcttctgatgtacacttttgggaaattttccaaccaaactgagggctgataaggaagcttggttattatcctaaaggaaaacatgctaagcgttgaactggccaagaaaaacgagggcacagaagatggatttggacctgccgcttcctccattgcatatttgtactatatttaagtgaaggcagtgttctcccaaatgaattttttcaagctacagtatttgacataaatggaagaaaagcagatcctccctacccatgccattacatgtggaaagcatgcagatcttggcacaacttccttcccaatacttcaaaggtcttgtctcagtctttctcttccttggggaaccaggaggatctgtcactgtagagcacttccttcagtgtaacatgttgtgttcacttagcatttgtcacaaccctcctttttgctttgtgctgttgtccatgtttcatcttccagtacttctaatgagctcatcaccatctctcctttgtccttgtcacaaccctattctgttacttcctttgggtgtcttacaggcatttcaagtccctattctaaatggaacccatggtcaaggtgacttctgctggaagcgcttttccagttgatggcctattcatccttctagttactgactctataatttctctaacaccatatattcacacatactcagtccactagaaatccacagtgaactcagaatctatcgccttttcttattttttcttttctcccctctgccttcttcctctccgtccttctttccttcctcctcctcttcctccttcttctctttgctcctccttcctctttcttcctcctcctcctccccttcctccatcctcttcttcttccttcttcttcctcctctttcctctctttcttcatttttcaagacagggtttctctgtgtagccctggctgtcccggaacttgctctgtagaccaggcacaccttacaggattaaaggtgtacaccaccattcttggctacttttttcctatcttgacttatatcttcccttcctcctccatggctcaaagtcggatctttgtgtcatgaatactgatctacctgcttttgtccctacttccttcagagtacagcctgcaaagaagggcattctgatatctcctatttcctgtgcacaaagtgttctgttgcctctaatgccacaatagataaaagtccatggtgaaggtcaaatttgcctttctttctttgtttccatcatctccttctcacttgctttgctccagccaaatggtttcttgttaacacatcagatgctagggccttctatccagaacattactccattggaagttactactctaaggctctgtctcccttcaattctttgttcaatgtcatctaatgtccccaccttatatactgttaaataccatttgctgtccacccctaaagctcttatcctagccatttctccctattttcacacaaaattgtaatattctagtatgttccacaactttcataggttttttttcttgttctcagttttaccctctgcacctaacacatggtagaatttaactaaacgtttttctttttctttttaaaaaatttttattagttattttatttatttacatttcaaatgttatccctcttccttttttcctctctaaaccacctctccctcctgcttctatgagggtactcccaacccaccaacccactcctgcctcactgccctagcattcccctttgctggagcatcaaggtttcataggaccaaaggcctctcctcctattgatgccagataagaccatcctctgctacatatgcaggtagagctctgggtccccccaggtgtactctttggttggtggtttagtccctggaagctctgggggatctggttagctggtattgttgctcttcctatggtgttgcaaacccttcagctccttccgtccttcccctaactccttcactggggaacctgtgctcagttggctgcaagcattgggaaggctctggcagagcctctcaggagacagctatatcaggttcctgtcagcaagcatcagcaatagtgtctgggtttgggggctgcatatgggatggatccccaggtggggcagtctcttggtggcctttccttctatctctgctccactctttgtccctgtatttcctttagacaagggcaattctgggttaaaatttttgagaagggtaggtggccccatctgtcaaccaggggccattcctcacctcttgatatggtctctacaggttctctctcccctttgttgggtatttcagctaatatcttccctgtcaggtcctgggagcctcttgctttcatggtgtctgggactttctgttggttacgcctagtttcctatctcccattgctacacacctttgttcaatttccagaccctctgtacatctcccccctcttctcccacacctgatcctgcccccctttcccctctcttactgtttttcaaatttgtgatttagctctttctagggacaccttcaacctcaagaattttcttatataaagaccctgcttagaaaatcctcatcgcttctttgcatctcactgatcacccatttctcccacaaggtggcagtctctactttaaatataggctgtagtggcctcaaattcaagactcaagctagtccctgcagagacagcttgacctggtagaccagctagctggaaagttcatagactgtgaatccttatcttaagagccagatgtgttgaaggaatggtaaaatttagggtttgggagccttccacaggagtggcacattataaaggtagaaatgtggttcttatgggagtggtggcagtgacattctaaaacccagtgaaagctgtcaatataaaaactgggtttacagacccagaaagacatatatagtatgtactggcttgtagggcatagttgtaaaataaagaataatcatgctacaatccacaaaactagagaggctaagtaataaggagggctcaaggggtgactcatgaatctccctgggaaggagaaatagaatagatatcaaaggtgagctggagatgggtaagtatgggaacaggattaggtcagggtgaagatgaagggagagggaacctggagagacaactgaaattggggtgcatttgggggggtgagatagaaacatagtacaatggaaactcccacaaatctacaagagtgaccctagacttctaataagggaagatatggaacctgaatcaatcatctcctgtaaccaggcaagacttccagtggagagattggaccaccaacccagcatttgacctacaattcttgcctacaagatgtgttgggtagaggtggcacagaaattgtagaagtggccaaccaatgattggtctagcttcagacctatgccatgagagggagcccagccctgacactgcctagagggccaaaacccgaaggctggatgaccaagagacagacataaccaggaaaaaagcaaaaaatgatattctatgatattctgctatacttgtatgaaggagagaggctccatccagtaagtagctatggaaacagatgcagaggctcacaacctaacattaggcagagctcagggaatcctgtagaagagggggaggaagattgtaagagtccgaggggacaaggacaccacaaaactaacagaatcaactaaccttggccagtaggagctcacagagactgaaccagtgatcagggagcctgcatgggtctaacctaggcccttggcatatagttatggttatatagcctgatcttcttgtgggactcctagcagtgggagcaggacttgtctatgacttttttttttttttttttgcaagctttggggacccttttcctcccactgggtcacctcatccagccttaatttgaggagaggtccttagtcttattgtaacttgatatgccatgtttggttgatgtctctgggaggcctgctctcttctgaagggaaatggaggagaagtggaagggggtggtggaaaggcctggaagaagaggagagaggggatataatatatgagagaaaatttaataataataacaactggatttaacaatcatatatatgtttcccctcattacaagaccttaccttttccttccctgatgatattattctagcatctaggcatgaccgttcagtactaatcttgaacatctcctgagacctagaatcatatgaatcacttttttttcttctagaagcaactctattagaaacataggtgcaaagtttggattttcctgtagggggcaacattgtctagcaaagacaacaacatctggcctgcaaggcagttctggagctagctagttggccttggacaaggctaagctgctctgagcttctttacttctaagtaagagacatagagtcctctgctggctggtgtgagcttttgatgtgagcatgagtcattggtatcttgggcagtgttccactcacaggaacattatggcacggtcacaactgtctgacctttcctctgttgctgttttctgcctttgctcacctggagtcagccaaccttgaaaaactcagaggaaagggaaggcatgagaggtagtgagtggtgggaacagaacaagtgaagctctgttggcaggagcagaggagtagaaaagaggatgcacgcgttgacctctagtcttgacatgtgggctaacttactctataccaaaaactgtaggactccattttggaaaacaaggaaaaaacctgccctcagactaagattcttcttcaccaggaaagtctttgtttcagcaagtcaagaggctaagaggggcttcttatgaaacttctgtccaatgcacatacttatgaaggcatctcaattgtcatgggcctttggattcttttgtatcccaagattgctcattaatgtctagaccagtggttctcaacttgtggtctcaatcccttttctggggaacaaccctttcacagaggtcccatatcagatgttctgcatatttgatatttatattatgattcatattaataacaaaattagttatgaagtagcaacaaattattttatagttggggatcaccataacacgagaaactgtattaaagggtcgtaaagggtcgcagcactaggaaggttgagaaccacctgctttagagcataacctaggaccactgggagcatcctataattgtgtgggttgggtttgttgctctctgtaagaaggaaacattcacagcaaaggttcgtggaggggggagttggcttggttttaagagtttaagggaaggttcaaggaagctggctttacttgaacagtgtcatggaatcaacaggatgagtctaattctctgatatgaaatcttgaaaaatttttctctaccgggctggaaacaagatgaaggcctaggtttggatagttaagatgcagcaatcacttcaatcagccaggtacaaggaaggattcggcatcatttcttcatgtttgtgatttctttttgttttgtttttgtctgtattcacattgcaatctaccattgctttatctgatgttggtgttgtgtcaaactgcttgtggtgaattgaagagacttcagatgaggatcgggtatgaggtcacattgtttgtgctctctgaatccagagctgtttgtccttcatctcccagcatctccacgaaaacccctgtccatttcctgtcctggggaggaggagctaaggcaactagctttgctaccagctctcttactctggagagagatgaaaagaacgaaagcagggaactgtctcagtctccttatcatctggatgctagggaccaaacaaaaccttatttctctaggcacttagcaggatgcccttgagtatattatacttatagcatcagttccagaaaatgtattcaaaatctgtaaagtatgacgttcagaaaattcaaacaaagtgaagaattctgggaaaagaaaatgaaatcttttttcttctggcaacacaaagaatcagatgactttagcttctgttctgatctaaaaagcatacaccttacgcaggaaagaaagggggaactcagggaccttagtagagtgcaccatctgtttttcattttgtttgagatctttcatttcctttctccttgaccttactggcaaagtctgggcctggcatccctctgtggtttgtgtgtgacttaacaaggacatattttaaagttggaaaagaaaagttcattgtaaaaggtctgtagtcctccttcctttcacatccttgggcttcaggatgagggatggacaccgaggacagaaacggtttatttgatagcatcctagacatgtaagacttatggcaacccccctggaaaatatgcaacagaggaatgagacagcctacatgcacattgactgatggtcagacaaagcgatactgttatacagtgaaatgttgttcagcctttaaaagggaggaaatttaatacatacgtggaggtttgaatgggaatgacccccacaggctcaaatatgtgaatttttggtttccagttgaactatttaggaatgactgggaagtgtggccttattggaggcgtgtccctgggagtgggttttaatgtttcaaaagtccatgccagactcagactcccccccacaaacacacccccaccacccgctccttgcagattagaatgtgcattcttagttactgctccagcgtgatgctctctgtcctctgagactctccctctgaaaccctaagcaagctcccaattaaaagctttcttctatcagctgctttggtcatgatgtaacctgatcatagcaggagcgaccctaattaagatgtaatatagctgggaacatcatgctaagtaaaattagccatttacaaagattccaggtttgtgagatgcctatcagattgaaggaaatagaaagaattgtggtagccagggactgggtaaaggaggggtggggtgttaatacggatgagttacaaacatcctgactatttacctggacacttaaacagagtcaagcagaaggtgcatctcagtggtagagcacttgcctagcatgtgtgatactgtatttagttcctagtactaaacaaaacaaaacaaaacaaaacaaaacaaaacaaaacaaaacaaaacaaaacaaaacaaaacaaaactacccagtactgttaggtgtcatagtcccaaaactcataaattctgttattataaccaaagtagagtttgcatcttgatgattgcaaactaaagacaagcacagctgagaaataagatcagagaaagagttgctgcaagcagcaggctcaagaagaaaagatagtagacacttttgaggcatgcttaggtaaaaattgtgaagcatatttttgcaggattacagtggtggatgagaacaattttgggggtgctcaccttgaatcataaagatggtaaccagtatcacttggcatgctcaactgtctttaaagaaagaaaagttttagctggaaaaaggaaaggatattttaaatgtcttactgtagaactttgcccctaaaagttagatcttaacattatttttaatttgttacaaggtaaaaaaaattcaaatacatagagaaatttaaaaagtattagaaaacaaaacaacaacaacaataacaacaataaacgaacaaaacaaaacattatttcctggagcagccaggaaaaagacacctaagtgcccagagctactcccctgagtgaatatgtgaagaacaggggaaagagggagaagagagagtacttagtggagagacagaagagaggagggtggagctgagcaaatcatgtactgtagagagaagtggaactggatagcagttagaaacaggcagacatgaggagccatggtgatgtctgagcccgggtgctaccaagggccgtgtctgcttctgtggcactgctccagccagagtctgtgctgatgtctgtggccagagttaacaccaaagaccatgaggatgtctctggcatgggctgccacttaaggccctgttgatgtccaagcactatacaaggctggctctgcctcttgcctaggcaccatgggagagctggctctggtgctggggatgctgaagagctggtcccagtaggatgagtgtgggagagctggccctgtgtccctcaccaaatgcagcactcagatccccacatctcttcccctgggcagcaccgtataactggtcgtggtaatgagagcaagggtgagtggccagagggcatgtgagcaggagagctggacctgcccctggcttggttaaagtaggagagttggtcccagtggtacatgtatgggagagctggtgagctgaccaactcagtttccacctaggcccagatccaggggtctgagttggcccaccagaacatccaccccatctatgaactgctggagcaaatgaagaggctggtcctgcagatcccgagctgtgggcactccatgacacagggtgacaacaggataactgagaagagttccagtgagggtccaatattgatgatgtgacaaaagctagaggctttgggaaagaccaatcaatgacttattgcaatgaacatttgcaaggaaagatgtgtggacaaatgcgtatactgtggtatgtgccatgacaggcggcaacttccacagcaagatttttatttaattcattttattttttgttcacttttgggtagggggaggctgccggactgaagggtaaaatgggtgggtttggaatgcatggtgtgaaattcacaaaggaccaataatttttttttaattttaaaaactgtacttataatgtatgcaagatgtttttgttattctctgcaaattaccaactcttccaagaatcaagtcttccaagtcatgttcagcagtactactccagtctcctctcctgagcagacagccctcctccagtgggtatcttgaatctttattacttcttgtactggaatataagacctaagagaagcatagaaataatttgtgaaggacgtgagtttcagcacttaaataagagtttgctgatgagaaggtctgctgtgtggcagggtctcagggcaggataactgctctttcccaccacgcttccagaagtggaaaatgttctctccttcttccatcttcttctgtttcaagtcctgcagatgctccaaaggaaagacgtagagatttttatgacggttgggacttagaacagagagttcttgagaaggccactgcattaattaccagaaagaaaacataaaccctggaagccgggaagccgccaaacgtctattttctcaattgcctgtgatggtactctataaattttgattgacactaaagtacatgatgtcatcacttttcctttttatgtatgtaaacggtacggaaggagagggccctaatggtttcctggcatcgttttcaaaggcaggtgctgatgaacttaagcttctcagtctagactctggaaagaaaccccatcaaacctttcacattttcatttgtatcccctgattctcaacccgaactagggtcagaactgcctggggtgggggtgggggtggggtggaagtgggaggtatgaatgccactgatgatcccgcccaacattaccaagcccacctgcagtaaccctacctacttaaagttttagtctgacacagagtaattggacatatttatgagtacaatgtggcatttggcctatgtatacactgtataaagaacagtgacagacagctctatcgcctcaggtgctcatgacttctctgtgttgggaacattcggtcctctctacttgctgttttgaaacattgcccttactgggggtactaaagaaccttaaggactttttttatacaaggtgtagtatgagacagaaaacgctggtgtcttcctattttcttcttaatgttattagatgcttgggtcattttaatttcacagagcctcagcctcaggtaattttcatctcacagggacattttacacagctaataggatggtgtcaagaactgactgcccctgggtatatgattccagatgaagggtatttcttgttgctatctatgttccaaaaatattttttaaactttttcaatgtctttctttttttcttttatttattttttttatatgttcctaagattgatatttattttacatgtagagttgttttgtctgtagatatgttcatgcaccatgtatgtgcagtgactgtggaagccagatggaggtgttagctctggaaactgaacacactgttgggagccaccgtgagccatctctccagactcttcaaaaatatttttaaaatctgttttccatctttcattttatagagatcagaactgccaggagatactgagtacattcaaaggagcatttgtttccaagaacccttgcaacatcacaagagaagactacgccccacttgttaaattggtcactcaaaccataccatgtaacaaggtaatgagggcgagtaattccttttaaaattgagaatgaaagtcagaggggagacatctgaggaccaatgttaggatgcagacagaaaggagaccttggcataggcatcatttgatatggctggtggggtcagattggtggtggtggggctttggagaactggtgtaccatcacagtttaggacatctggggaaggaagtaagagagagatggggacacagaggaaagacagaatctagcatcagttccatccacacaaacgagagtaacccaaatttttgtaattatggaactttcccctggcttctgctaataagaaaggagtaaaccacaacacaaggcgaagttccattagaagagcgattttcttacgtcttcttagctcttcagagctatcctctggaggcgcaaaccaggtaaagaggctttaaagtgaccagctggaatgtaaatagaaggcaacatggagtcagaggaacccagtgttcggtcctttgagtatactgggaaaggtctaccacaagttacaactcttacaaagcctgtgtttaaaagaaaatgtcacatgtccaaaactaagtgaagcccccaaacccactcacaattgtcagttctcatcctgtggttagtaagctggagatttccggggctgtttccccaggagcctcagtacagtgctctgaacagaggaggtctgtggtagacaatagcaaaactgaatttatattagtgcatgtcatttattctgatggtttctatagtttttatttataaaaggtatgtatgtatgtatgtatgtatgtatgtatgtatgtatgtattatgtactatgtattgtagtgctggggatggaacctagagcctcatgtgtgttagcactcaatctactgctgacccacatctctaactcttagatttatttttggacctactaaattgtggttttgttctttctcagactctcttttggagcaaatccaaacacctggcccatcaatatacttggatccagggaaagatgttcaccctggaggacaccctgctgggctacattgctgatgatctcaggtggtgtggagaccctagtacttctggtaaggatctgaaccacctaggatggctcagggtgagtgggaagggagctttgagctgcaagggaacttgaaaggtcaataggcatatactctaatgccatcagtgaccttagtgacaaactgggctctaacaaaacaaaaaaaaatcactgtcctcttgaaatacaagctttggggtttagggttgatcttcaagggatagatatacatataggggaaacatcaccataagaggggaagcaagagagagtgaaaaaagccaaggtcagtttttactcctttttgtgatcactaatctagtccaatgtcccaatctcccaagaaagtctttaatccattcatggattaaaaatccattcatgggggtaaattccctcatgagctcaactccatttagaggtcccatcaacaaaacacattgcaacagagaattcagcttaatgggaacattggtgacacacacactatcaagccacagtgctactttataaggctgttgaggtaagacatccccaaatccagtctctccctcactttccctctctacatccttcctgttctccccttttcctgcctcttccactttcctcttttccctcctccctctccactttcttctttctcttctgcacttttggcaagaaatctcctccttaacctttatatatgtatttacacacacacacacacacacacacacacacacacacgttatatattcttgaacataactctaagtcatttttttaaaaaaatttaaattaaaattatatatatttttatctgtacagagtaatattggatataaatagacatagtgaacggattgttatctgtgagctatttaacatggacaactttgggtaccatcttaaggtgatctctttctttccccttcatagccagtgatgatctatttgcctagagagccatctgtgcatctcccctcacactgccttttagcaccatcacaccctctccatcctgctgggaatgctataaggttttactggtcactctttaccctcctaggtcagtctccatctgacaccatagtttttctcagagtgaaaatgggatgatgtcgatctccctctagaacctaacaatctctcttttgactctaggctaatggtctaaagacctgacctctgtgtttcagatgcctcaccttctcattcccttctccatcctcttttctgatcaaagctcatcatggctctttgcctttgcaccgtgccataggcacaaggtgcccttctctttagagtctgtctgaagacagtgattcttcttcaaagtaaatttcaacgtgaatctgtctctgattatttgacttcactacatcacatgtcctatgaggcagggctcccacctgattcaaccctctatctccagaacctaaccttcagtaaatgtttatatatatatgtgtgtgtgtgtgtgtgtgtgtttatatatatatgtatatatatatgtatatatatatatatatgcaaataaccttgagaacagtgtcatagaaaccatgcttctactctatactttgcaccacactaagggctaaacctgttttggtagggttgactatagaaagcctgagatcacctgagcccccaaatttatggaggttgaaaaggaaactctccataaaagagaattgccaggaatcagaggactatctgggggaaagtgtcttcttcccgaaaaggcctggccttctccctaagtgttcctggactccaggggagtgagaggggccggtgtctttagggtgcacttttgttgccatttcccagaatggtgagtcaaaacccatcacagtgttcctgtctgggatctggacggggaggtaaagagttggaaggaaatcaggggacacttacttaaattgggttgagctgtgtccattctccagcctctgtcttggcacagatgctgttggaaagttctcctatggggattggacagccaagaacggagcccaaaggtacatttcctttccatttaactgttttctataaacaatgtgttttagatatgaactatgtctcttgcccacattggagtgaaaactgtcccaacaaccctattactatgttctggaaagtgatttcccaaaaggtaagtcccaaatagttaaattctagagttttcactgaagatactgttcagtccatgactggttgacttctggccctttgggtggggggtacagatgattttaggtgtaaaagtatgaaaggaaatcatgccagaagatttttctacacaacttcagaacacccaggaaggcttgggagctcaggggaagaaacctaacccagtgaggaggtaacactcactggctgtgtctaccaggatgctaggcttggcttagtcctgggacccaggtattgacttgatttctggaacagtcttaataattggcatttgtagaccacttgatgtgtgtccaactctttgcaggagttaagaactctagcctcacaacagccatatgaaacaccatcaatatcacgactacttgtaaaaatcttttttaaaatttgtttacctttatttttatatgaattggtgtttttgcctgcatgtctgtctatgtgagagtgtcagatcttggagttacaaactgccatatgggtattaggatttgaacccaggttctctggtagatctgtcagtgcctttaactgctgcactatatttccaacccccaaaaccaattttcttagacattctgatcagtttccttatttcatcttcaccaaatggaaattaacacatacctagtctagatagctattggtgcattcaaataaaatatcactagcttgttaagtaatggaacccacctacacaacaaatgtttattgaagacttactgcatgttttaaaaactcaaagacgctgtatatttttgtttgctcgcttttacagagaatgttttccatttgtgttatcactttgggatatgttttacagccacatcatctctgaaaccccctacagcagttcatgttttatataaactaaatgcttccttgtatcacatctcagccttggtaccaaggctaagatgctgagggtgattggaggcaccttggcttctgagacactgtgcacctgtaccttgttctaggatctctttgaggaagacaaacaaactagtccctctttttgacaataaggatggttcttcttacaggtttgaattcccagatcaccttgttgctaagttgtgtgaccttgaggccaacggtgccaatgcttactttgtgtcagaggacttgtgagaattctcctttatagggttcaggactcttctgggtcagtgcttaatgattaatcataaggagtaggacttggtccctctgtggttacacaagcaccactggacttcataataaagctctgaatctatctgtagtgtagaagtcacccgcagagtaaagtgcaggttccccaacaaagtacaaggccatctatgaactgaatattcaatatcgactgcaactttccccacaaactactgttctcctaaaccaagggccccttccagtcacagcttcaccagtggagtcctgaccgctctttgggacgtgggttctgtttgctatacagcactttcttggtctttcctagtgtccagtgcagagtatcttcttttctcctgtcatccttttcatccctggaattttactgagtaaaacatacctgtgtcatgcactaggtataaagcactgaaagttctagaagcacataggaatccaagctctttgttctcacaaagctcttcgtactgacggctaaaactgttcaacccgccataacaatgaaatgttgttaagtaatgtgcacagatgtcgtggaaggagacccacgtcccagaggtctgtctccaaaggaagctgaacagtactccgttcacatggtgacctccagtgcttagcagacctcccagctgaaagttggttgcatgaagaaataaaactccttgttcaaccatgttcttttattcaagcaccacactccctccttctttatgcctttctagagcctcaggatcactgcctcttacctgggcttccctttctacagtgttcccctaaattgtccaccttacttctgctaaataagatgtagcatctacagaacatgataccaagtgagtgctttcattcatgcaaattgccatggctgcattaagaattcatacaaagtaaattcttcctgtggcttagactattggatagattcaccattcttgtactagaactagggaggctattctctctccctctctagttagtactaagtactctttggatggaattgctgaagaataatgatgaacttccttttcttcctcctcttcttcctcttcctcctctttctcctcctcctcctcttcctcttcttccttctcttcttggttttggtctttgacagggtttctctgtatagctttggctgtcctggacatcactctgtagaccaggctactccaaactagcagagatccaaccacctgcctttgcctcccaagtgctgcaatcaaaggcatgtgtcaccactcagtctggctgacggacttcttttttaagtttgcagaagatgcctgtggtgtggtccaagtgatgctcaatgggtccctccgtgagccattttacaaaaacaggtactcatttcctttctttgtgcaagggttaattatcacagttaccatagtctcctgatggacatggcattcctagaaaggatgtactttccatgtttcatatcagtcctgaagtgctgagcttttaaaagggaaagcttatggattcgctcctttctgggtcaatgtttggtctggttcatctaagatcctccaaagttcctaaaggccattgcaggttcccagtcattgcccttgactttttgaggtctcacataattttcttagcttccttccccctgcattctatgctctcatttcatcgatactgtctaccctgcatctacccgtctccctgttagcatcctcaccatggctctctcctgtgtgaagagcaggaatcccacgtcattggaacatcagaaaccatgcagggctgtgatcctcctcctcctcttttggaagtgttgccagcaaagtcctgtagtgatataatggtgaagacaccagaggtccttatacatactatatgtgaccttgtgcaggcatctagcctctaggttgaggatgcatagaaagaaactgagataaagtgtgaacagtgctgcactccatgcctattgaaaattctctagtacatattagcttttttttttctttttcatttaatcctcagggctgagttggtccacactcaagccttccttctctggcctccttctcgccttagtttctatcatcatcatggtcttgttctctaatctttctctgatgagaatgcttctaaaaatgagagcacatattaattttcttcaggcactgtagataccctcaattaattgttcctttcttctgctttagtatttagtattataaagccacatttaccttttttccttcttctggacctttttttgggggtggggtggggggggctttgggtgaaagtgctggtgttcaaaatctcaccctctgatgttggagacccaagtccttgcctcaggatgggtagctgtccacactaacaagaaaggatctagaaagatgttgttgaatggacagtctctgtttctaactagctctctggtaatgctactctttgagcagcaagtatttttttaatgtatcagtcagcatcgatgtacagttaaaactcttatcttgaaaatctcataaccaagagtcatgttgaaagaggaacagtgggaagcaagggaggttctgttcaatcgtgcagggacaggaggtatggatgccctgcgctttggcttgaggtcagttatttacctcttctgtttcagcacctttggaagtgtggaagtctttagtttggacccaaataaggttcataaactacaggcctgggtgatgcacgacatcgaaggagcttccaggtatgttattgcttagtagcggagtgatgagaccatcactatgactcagcctgcagaaggaatccaaggtcacaggaacacactgggaatagactggcttagcaaatgaatggggcttacacacttggccctccttctagtctctaaattctgtctccacaaccgacagtgactgcttcacacctttgctcctggtgaccagagaagccccagagggggatgtctgcctcacctctactcagtgctgtttcaagaggcagtaagagagactcagagagtgtatgaaatatcttattatttgaatatttcttccctagtaacgcatgttcaagctcctccttaaatgagctgaagatgattgtgcagaaaaggaatatgatatttgcctgcgtggataactacaggtaactgatttcttgggaacaaaagagctgtgtgtgctgagagggctttagggatcctctcaggccttggtggtgctctcactggtctctgccctgccaccaaacctagcttgtttccctagccaatggcctaaatctggctggctgtcctccgttccctgcctccttgcctgccagccctaagtgatgtcttgacttagaagctgactgatgcccagagtacacatttctttcttgctttactgctgtatttcctatttcagaggagcagaaatatgttttgccagggcctttctcccaagttttaaaatcccttgactggctataaatttgcatgtgaaatctccttggttagattcagatgtaagtatctaatatttggcaaatttccacatgagagtctaacaagatttatcgttctagattaagagcaaaactgatataaataaattcttgaagaaaatttaccattagcctatgggcaggtatgttgtctttacagtcacctttatctttaaaatgtcaagaccccctcatagtttttaactatgttgtggccaatgatacaggcagggacatcttcctctacagagaagcacttttggagcttttcctatgaggaatagcttccaccaagactaaagcagagagaaaaggctttatgtacaagctaaggagagggaatatttttttttaatctcttcatgtcacctaccatcaaagacaggcttaaaagatggatggctcatttcccagatgacccaagcttccctccaatcagctctctgttctttggaaacttccaaaaaaaatgaagaaaacaaaacaaaacaaaacaaaacaacacaacaaacaaagacaaaaccaacaaaacccagaaactgtcaacatgcatcagttaagtgcaaaaacaaaagaaatgatcaactataacagaaactctctatgcagctgactaggctaattcactcacagatattttgtatcaaaaagaagtacaggaagactaggtgaaggttgagaaatgtagagcctgtggttttgttagctcacattttatgaaaatggcagtctttttaaattacaagttagatgttggggcccgccagcggcccacatgtctgggttctagctgggaggcatcttggaatctggaagagaagagggagctaggcggtgcgagagagaatggaaccaagacaacagtctaatcaaggttcaattttactattcccagacactgggttatgaagaaggggaaggggcccattcccgccaaactggagtttcagtttcaggtgaccacgtgatagctccggaacagctaggcggcaggtagtagcagtgggagtggcagaccgataaggtggcaggctccacccggaagctctcttcgtgctaacagtgaaaactgatcagccaggtttcaggctgaggggggaggttacagttagatacttacgtaaagcttgccttgtgtagggggagtgtggtcctctcacaatgtcgtccaaacctcttgaggaaggtccctgagttctttgctgtcaaatgctttcacccagaggtcaccaggaagcctctaatctgaggaaagaagaatactcaggagggaactgtgtgggcctggttccagtggccgtatctgctgtcatctgggcatcagctgttaaatacttgtgacacatctgagccagttgtttgtttttaacctccacatattactgttgtacactctctttggtatttatttctatggtcttacaagtgaactgcaactaacttggcacatgctttcaagtcatttactcctgggtcaggcctttctcagtgctgtctctgagctcagatggatgtggatgctcagtggttaatctttggttgctatgatgcgtctttcttcattgacaagttggaccatagtgacatcatctggtctctttcctcttaagattcttgtcacatttatatttatttatttatttatttatttatttatttatttatttattatgtgtgtgtgtgtgtgtgtgtgtgtgtgtgtgtgtgtgtgtgtatgtatgtatgtatgcacacatgtgtgcacataccatagccttcgtgtggacatcaaaggacaacttgtaggagtcagtgcttcgttcaagcacgtgaactctggggatcaaactctcaggtcactgggtacggcagtgagcacctttgccccatgacccatcttgccagccctcatccagtccctgacttcctttctttcttctctcccacaggcctgccaggtttcttcagtgtgtgaagaaccctgagcacccatcgtgtagacttaatacgtgaaggatctggatcttagatcacctgtagcctggactgagatgaaggggctcagaagcaacactggtggaaagctgaaactgtcagggagaagcctctactacagtgttaacaccagagatggaagaacttcccaattctctgtgtactaccaacattcaagaaaaattactccataaaccagagttaaacttctatattgttatattagtctaactttctcatgtggtgcttctgtattgtttatatattgcttacatccttttattcctcttttaatgatctctcttttctctctctctctctctctctctctctctcaatgaggctgagaatccaacctgagaactttcatacatggtggataagcctatataccactgagctaaatcctcagcacagctgataacatcatttttgctgaaaaatggccaatcaaacttcccattagacaaagaaagtcaaatgtcaagtatatcgaaatgaatgaccctttttttttttatgttttttcattcttcccacagatattcacatggtaaacctgaggtcatagggtcattatagggaaggtgctgtgtgggaactacccacgtgccctgtgctttaatctttaactcaacacgtccctgataactttgagcattcttttcttttcttttctttccttttcttttcttttcttttctttttcttttttttaaacagaagaaaatggagtttagagagataattgattttcctaaagtcacattcttaagatcatggttacatctagaattaaatcagttctgtcaaagtccacaacatatgatagtttttttcttttccgagcttttattgccaaattggtagtagcctgtgttgtcgtctagcaaatgctattgcattagattgaatataatagaatctgaaatgtgatctttatggaagatcacaaaactaattacttgcaccctctttctcttccacttcattcttggtgccttttataggcagtcaagagttaacatatatttgttgctaatattggcaatttatgttttctatcctttttttcttagatcagtcttgctcagaatcactggttttgttatgttgttgttgttgctattgttattgttcttgtctttttcaaagctcaaatctttaactttcctcatttatttatttaattgagctttagtctttatttttagaaacatagaaatttcttctagctatctggaatatcttcagttttttgaggcaaatgcttagaccattgatatttcagtctgttttctacacatgtactttaggattctaggtttctccctgagccctgctttcgatgtaacactgaatttctgtatgtctttactggttagttactttgatagtttgtatatgcttgacccagtgagtggcaggattagaaggtatggccttgctggaataggtgtgccactgtgggtgtagtcttaagacccttaccctagctgcctggaggccactattccactaacagccttcaaatgaaaatataaaactctcagctctgcctgtgccatgcctgcctggatgctgccatgctcccaccttgatgataatggactgaacctctgaacctgtaagccagccccaatttgttgtccttataaaagacttgctttggtcatggtatctgttcacagcagaaagaacctaactaagacagttaccattcagttcaaaataattcttgattttattgttatttagacatgtgatatttacttttcaacatctggagaattgtttaggttttttttgtgtgtgtgtctttagtaggtattaataaactaaattgagacaactccaaagtatttgcttggtttattgaaaatagcataaacagagccaggtgcttctgtattcatgttttgacaccagtttgtgattgttgaacaatatatcttatttctaaacttttaaaaagctacttaaagacattaacttgctcccttacaatatgttgatggttcagtccattaaatgcttactttgtaagtacgagtgcttggattcaattcccccaaaccatgtgacggttaggaggcagaagcaggtgaatctctgtgggtttgaagccagcctgacccaggacaaccagggccacacagaaagatgttatctccctcatacacacacctcaaataaaacagtaaacaacaacaaacaaacaaacaaacaagtaggtgagtggtgcaccattggaatctcaggaatgaagaagcaaagacaggttccctactcccttcctcacccccaggctaactgataagcccaggcctcagagaaaggctttttcaaactgtcaaggtagaaggtatctaacaaatgacagctgagtgtgttctgtagcctttctgtgcatgggcacacatatgaatctgtgcttgcctcccccttctcaaatatggtgttagactgtatgataaaaattgttaacctgtcacaaagccttgacaagttggggttgcattagttagaatatatattcaaaaagggtgggtagtacaccactggattctcagtaataaagaagcagagacaggtttcccactccctgtatgggggagtgagaattatatacataagaatatatatatatatatatatatatatatatatatatatatatatgtgtgtgtgtgtgtgtgtgtgtgtgtgtgtgtgtgtgtgtctaccaacagaagatccaagaatccagtagttgttcagttcatgaggctggatatctcagctagtcttcagtatatgccagaatctgaaagaagtaggcaggcttctacttccgggtcaaagccatggcggtggcaaattcaagtccagtcaatccagtggtcttcttcgatgtcagcattggcggccaggaagttggtcgcatgaagatcgagctctttgcagacgtggtgcctaagacggcagagaactttaggcaattctgcaccggagagttcagaaaagatggcgttccgataggatacaaaggaagcaccttccacagggtcataaaggatttcatgattcagggtggagattttgttaatggcgatggcactggagtcgccagtatttaccggggtccatttgcggatgaaaattttaaacttagacactctgctccaggcctgctttccatggcaaacagtggtcccagtacaaatggctgccagttctttatcacgtgttctaagtgtgattggctggatggaaagcatgtagtgtttggaaaaatcattgacggacttctagtgatgaggaagatcgagaatgttcccacaggccccaacaataagcccaaactgccagtggtgatctcacagtgtggggaaatgtaatctagacaagacggaactaggtcctctgctgttttggtgtgacattctctctcaagtctgacaagctggactggcctctgtgtttgcttccctgtctccacagtatgcgatccaggacctggaagtatcacaaatgagaaccaatcatcctgtttaaattttggactgtaaataaaggaatttttttaatgcaaaaaacaaaacaaaacaaaacaaaacaacaacaaaaaaaaagaagtaggctccaatgccagtggaaaaaatggacttgctaacaagagagagagagaaagagagagagagagagaacaagcaagcaaagaaagaacaagctttcttcttcagtgttgtttatataggctgccaacagaaggagtagcccagattaaaggtggatcttcccacctcaaaaatccagattagaagtgggttttctaacttgaaatgattaataatagtaataataataataataaccatcatcatcctccccacacagatgtgcccagccctttaggttttaattaattccagatgtagtcaagttgacaaccaagaatatccatgcagacctgttcctttctgtcttcctctggttgaagatcctgttcttttaagagcccacgtggctgtagccacagtggacacacagtggatagctctcactggtgtctggaccactaatgcatccttatagagaatttaagtcttgacttgacaaccctcttctgacagggattcagatcttccccagctttcaagtagcttccccttcaaaatgtcctcggagccagatccctgctggtccagcctgcaacctggagcttttgcataagacttcctcccttctaggaaggctggttgctagatttactaatgtccttgctccagaacatcttttggaggtggctgctgttccagaaactcctgggccttcacatccccttcttagatgaagtggacagaatcaaatcaacttgtaagatgtgcctaagattttttttttttttttttttttttttttttggttttttgagacagggtttctctgtatagccctggatgtcctggaactcactttgtagaccaggctggcctcaaactcagcaatctgcctgcctctgcctcccaagtgctgggattaaaggtgtgtgccatcaccgcctggcaaactaaaccaccaatcaaagaaaacacatggtggaacttgtggttctagttgtatatgtagcagaagatgacctagtcgatcatcaatgggaggagaggccctaggtcctgtgaaggttctatgacccagtataggggaatgccaggatcagaaatgggagtgggtgggttggggagcagggagaggggggaggggataggagattttcagaggggaaactaggaaaggggatagcatttgaaatataaataaagaaaatatcttttaaaaaatgtgcctaagatagaaatcaacttataagacattaccaggaaaattcctcagaggtcaactttcaggccagtggagaactcagaggaggcaaatcacaaggttttcacatgatgctgaagagggccctcagaagccccagaggtagcttggaggtgtagatgttccttcccccaccccatctccctttatcacagtggttctcatccttcctaatgctgtgaccttttaatatagttcctcatgttgtggtgaccctcaaccacaaaattacttcattgctctgtcacaactgtaactttgctactgttatgaatcataaggtaaatatccgatacgcagaatctgataagccacaggttgagaactgctgccttattatcatagcacactatccgaacttttctctctgtagtcctgactttgagcatctataccattggccctgctgccatttccagccctgagcacttgatggcctgtgtgtacaataggtagtccatactcctcttcttatgtgactgttacattactgttgcctcataaactttctacaccagctctccatctctgtcttctatcatagctactcaaacagtgtagaaataacctcagacctaatgtccttctaatttccttcggctcctccatttcctattgtgataatttttgactttacagtgtttgaagcacagtttcaaagagttctgaaaaggaggttgaatgcttgaaagtgtgtgtgggggggagtggtgtgtgtatctggcaatgtacagtaattacattaattgttgctagctggtaagcaaaactatcaaatttgaggaaaaaaaccatatttttccttcagctttgtctcagttactctctgttgttctttcattgtctgaaaacagcccaactcaagtctgcatgttctcagatgcaaaagacagcatcagcaacagacttcctcctcctcagtggcccgtttcttcctgaaacaaattcccatgtttataacatgtgtgtagggctggagagatgactcagccattaaaggctaggctcataaccaaaaatataacttgtgtgtcttgggaagactctgcttggctgactgttaaatgttaagaagaacatcattttgcttttgagtaatagtctttggaaatccaggttgtaactaatctgatgcatcaggaagacttttgaatagaggggaaaggtgacaggcacaaaggagtctcattctgcatgtggccagaagaaaaggaccatagatgccccactcatcacttactcttctctggtttttgaacagagcccagataggtctttaactcatcgtaatccccctgcctcagcctcctgagtgctggggttacaagcatgtacaatcaagccagctttccttcctctttggaatctacaccaccctctcagtttctaccatagctcatctccctccaaagagaactgaacgtgaaggccctgtgagcagtccagtggtttgtggcactagacagctgagccaacgcacgaggaagatgcaaatttgttagcttccagcaatttgcctatacctatctatacattcttcatgaagcagtacagcttatcaaaatgttatgcatggtaaactgggacatcaatgggattcggagacccctgcaaggtctgggatgcaaggtgcccagcaactgtcccacggccttgagatacattttagaggagctggatggcgatattttctgtctccaggagaccaaagtgagcagagatgcgctgacggagcccttggcttttgttgagggctataactcctatttcagcttcagtcacagccggagtggctatcctggtgtagctactttctgtaaggacagtgttacatccgtggctgctgaagaaagcctgagtggtcagtttgccaccctgaaccggcatgtcggttgctatggaaacatgaccgcgttcacccaagagcagctacaggctctggatatcgagggctgagctgtccttacacagcaaaaggtcttcacacaggaagagaaggagaagcctttgaccctgatcaatgtgtactgcctgtgtaccgatcctaggaacccggagtggctgatctttaagatgcatttctatcgcttgctgcaaatccgagcagaagcactcctggcagcccggcagtcatgtgataatcctggggggcatgaatatagcgtactgtcccattgaccactgtgatgctggcggtctggggtgctttgaagaagtcctgggtcgtaagaggatggatggcttgcttagtaacccggaataccaggctgggtcccatataggacctttcatggatagctatctctatttctatccaaaacaggagagggcctttacctgctggtcagtgatcagtagtgtccgcaatctcaactatggcacccgacttgactacatactgggatacaggactctaactatagacactttccaagatgccttcctgctccctgagatgatgggctctgaccactgccctgtggaagctgtcttgcatgtgtcctgtatgccagcaaagcagtgcccagctctgtgcacccattttctccccgagtttgcaggtacccagctcaagattcttggcttcctagtcccttgtgaacaagaacctatgtggtggcagccagtcctgcagcccagcaaacaagtccagctacagaaaaagagaaaagcccacaggcactcatccaggcctcgaaagcatcaaggtggtcccagaaaacaccagaaaaacctgatgagttattttcagccttctgttagcttttcccagacttttggtgtggaactacctaagctgcctctggtgggcactcttgtaactccaacaactctggaaggggatgtgatagccacaaagaaggataagcaggccaaggtttctgaggtcagaaatgaggaggaggcacagacctcattctggaaatctgtgctgagtgggccctcagccacgcccctctgcagaggccacagggagccatgtgtgatgtggattgtgaaaaaaacaggatccaacctgggccgccatttctttctttcgttctttttttttttttaagatttatttatttattatatataagtacactgtacctgtcttcagacaccccagaagagggagtcagatcttgttacggatggttgtgagccacgatgtggttgctgggatttgaactcaggaccttcagaagagcagtcagtgctcttaactgctgagccatctctccagcccctgggccgccatttctacacatgtgccaagccacagggtcctccaaatgacccctcatcaagctgcaacttcttcctgtggaccaagcccagatgaaccaactgaggcctaggaatgtctacctggccaccagggtctgaagccaggtctctatctcctaagttgccttctccctgaggcttcatttcttcctttcttcttccccttcctcttcccttcccctgccctagcttcccctgagacactcttcttctcacacttcttcctctttgtccacacaggaacaagctgcccaggaagttgtaatcttaaactcctgttgcctggaatgggcaatgcatttgttcttaagcaaagtctgtgcctttatttcagtgcttaaaaaaaaaaaataaaattcttgggtttgggaatcaatcacacaatgacatatctgttctctgtgaagaaaattcacctgtactcctcttaggatgtgatacagtgacataagaaaatgcatggttcttgctaagtgacacaaatgtgagacagcacttagaagcttgatgtaaagagtagacctatagagaagaggcctaccaataattacatctggcactccacacagcatcactgtcagccacctctgcggctacaacagaatgcaactttgagtgcacatacattttctaaatgctacttggattttatggattctctggggggaggggcaagaaacagatttgggagtcacccaggtaaaaatagcaccaccaggtacttcactgactggagaggtgaaagagtcttcgtttaccttctagataactggctacccttccttctatgctaaaacagtcatagctatttctgggaatagaatttacagaagtggatggcaggtgatgggtgggtcctgacgtttgctaactatatcattttcaaattcattgtgtaggcctgcctaaggtgaaagcctgatataaataactgcttagagcaggctctggttccctctttttaaaaatgggagtcacagtaacttgcactgccatggtcagcttttactgccaacttaacacagcctatagtatgtgatatatgcatacacacatacaatttagtacagttgtatgagagagaggagagtcttagttgaggagcttcctagatcgaattggcctgtgggtctatctgtgggggttgtcttggtcagtaattgatgcagaagggcctatcccactgtgagtagcaccattccctagccaggtggtcctaaactgaatagaaaactaacttaccataagcctgtctgtgagctagcaagcagtgtcctctgtgtttcctgtcacacttctttgcctatgaagtgtattccttgattgaaggtaatattgtatggaataagaagcaaaccgaccttcaagttcctgccttcagctcctgcctggacttccctcagtgacagactgtaacctggggttacaagctaaaatatacatctctttcccctaggttgtctttggtcagagcattttgtcacagcaacaaaacagaagctgtttaataatatatattaaaaagagcagagtacggaaggtagccagaagaacaagagtagcttaaagagccaggataatgtttgaactgtatttttaccctttccaagaaggtgacagcatagacgagcaaggcaaacattaaggcaaaaatttaaagagagagaaacgtgagctaaggagactcatgcacaggaaatctttattttaccttcactgcattttgatgtctagcggaacagagccaacactaagctgaatatcacataaaagaaacaaaatgcaaaaagcaaggcaaagcaaaacgaaaaccaagtgtctttaaaggcctaaggtactagactgtatctatagctgacagggcaacttgaacaacattaaacagcaatgatctttactaaagaagccgtgccatcacaacagcttctccagtgtttccctgactggctacagtgcggttctgtaaggtcttctgctggagttgcccagagactcctaagagcactgggagtgttctcaacatgttggtgaatggtgatttccttctcgatagacctgtcctggctttcccacaaagcatgtaaagggcttaaaggggaagcatcacagatgctctttagacctgggaaaacggctccatcatcaccagaaggctcctgctccaagcatgcctgctccaagtggaatcctctggacagaaaacccatagctccctccgagtgaacaattaggaagaaagaatatgatttcgtgtttcacctgaccacattttggctttaggcatcctgccaagaaatagagcaaattcttggttatcctaaaggtaaaatcaaagggtactcagagcttttctctagtgctctaggcaactagtttgggatagagacaaggacatgaaccttcccattccagactggatatggtgctgaaggtatgcagttacaactttaaggtagtctggagtgggtgggcagagaagacccacttcttgaggggaaaacatagtttcccaccgagtaacttttatgctcataatccttgaaagatcatttaaaatgagggaaatctcagtaagacctctctggttcttaggttaggaataggagcagtggcccaaaatctgactttcctgacctttgaactggcaccctctgcacagcatccacacctgaacggatgccccggcttcacagcctatggtggtacccaagcatttgagggttgccttaaagagatgtgaagaggagttgcagttgccacccagagcagactgtcagttactcataacaagtcattcattcattccattcaaagtcaatcttctgactttctacacaataagaacaatctttcattttatatatttacaagcagaagagacgtatccttcaaagaaaagacattctgaggctctataaagtgcagttaatttaaggcaaattcatatgaaatagaaatagtgacttattatctctttatatacacactttccagctttaaaaggtaaattctctttccctcaaaaacaggagagagagaagaggacttttgtagggtggtgagctatgcacagacagcctggtccccggccaagcacaggccttgaaccaagctcctggtattctgcctggactccacccccatagttaccagacaacagccaggtaggctgagcccactataaaaggagctgttggccccctcctctttctcttaccctcttgcttctactttcttactctcacctctcaccctttttcccctccttccatttcccctgtctccacgtggccatggctaatctctgcttctttactctcttcctctttctgtctttctacaataaacgccttaaaaccatggactgcctcttctcatcaggatccgctgtgctggagcagtgaagcaggtcttcccctaacaagcccgagtgtctaacctctgactggaaggtaaccagccagagccctcctcctgcccttttcccttcggccccagggctagagccggtccatgggtccactctgttctcagctctttctcagcattcagtggtgcctgtggtgcccaagagtgagaacgtgctgatgtcagcatctttgcggctcaggacccccaagctggctccctgcaggtccacagggacctcagactgtgcttcctcacccctggagcggtcccatggattctcacagtccgacgctcaagtaaaaaaaaaaaatttttttaatttttaaaatagtgttttcaaacaagttaaaaagtgacaatgtgccgagcggtggtggcacacgcctttaatcccagcactcgggaggcaggggcaggcggatttctgagttcgaggccagcctggtctacaaagtgagttctaggacagccaaggctacacagagaaaccctgtctc

SEQ ID NO: 1423 - DNA, 2971 bp, Mus musculus
gcctagcctgggccagtcttcgggagcccaatggctaactatgaatttagccaggtgtctggggacagacctggctgccgcctctctaggaaagcccagatcggtctcggagtgggtctcctggtcctgatcgccttggtagtagggatcgtggtcatacttctgaggccgcgctcactcctggtgtggactggagagcctaccacgaagcacttttctgacatcttcctgggacgctgcctcatctacactcagatcctccggccggagatgagagatcagaactgccaggagatactgagtacattcaaaggagcatttgtttccaagaacccttgcaacatcacaagagaagactacgccccacttgttaaattggtcactcaaaccataccatgtaacaagactctcttttggagcaaatccaaacacctggcccatcaatatacttggatccagggaaagatgttcaccctggaggacaccctgctgggctacattgctgatgatctcaggtggtgtggagaccctagtacttctgatatgaactatgtctcttgcccacattggagtgaaaactgtcccaacaaccctattactatgttctggaaagtgatttcccaaaagtttgcagaagatgcctgtggtgtggtccaagtgatgctcaatgggtccctccgtgagccattttacaaaaacagcacctttggaagtgtggaagtctttagtttggacccaaataaggttcataaactacaggcctgggtgatgcacgacatcgaaggagcttccagtaacgcatgttcaagctcctccttaaatgagctgaagatgattgtgcagaaaaggaatatgatatttgcctgcgtggataactacaggcctgccaggtttcttcagtgtgtgaagaaccctgagcacccatcgtgtagacttaatacgtgaaggatctggatcttagatcacctgtagcctggactgagatgaaggggctcagaagcaacactggtggaaagctgaaactgtcagggagaagcctctactacagtgttaacaccagagatggaagaacttcccaattctctgtgtactaccaacattcaagaaaaattactccataaaccagagttaaacttctatattgttatattagtctaactttctcatgtggtgcttctgtattgtttatatattgcttacatccttttattcctcttttaatgatctctcttttctctctctctctctctctctctctctctcaatgaggctgagaatccaacctgagaactttcatacatggtggataagcctatataccactgagctaaatcctcagcacagctgataacatcatttttgctgaaaaatggccaatcaaacttcccattagacaaagaaagtcaaatgtcaagtatatcgaaatgaatgaccctttttttttttatgttttttcattcttcccacagatattcacatggtaaacctgaggtcatagggtcattatagggaaggtgctgtgtgggaactacccacgtgccctgtgctttaatctttaactcaacacgtccctgataactttgagcattcttttcttttcttttctttccttttcttttcttttcttttctttttcttttttttaaacagaagaaaatggagtttagagagataattgattttcctaaagtcacattcttaagatcatggttacatctagaattaaatcagttctgtcaaagtccacaacatatgatagtttttttcttttccgagcttttattgccaaattggtagtagcctgtgttgtcgtctagcaaatgctattgcattagattgaatataatagaatctgaaatgtgatctttatggaagatcacaaaactaattacttgcaccctctttctcttccacttcattcttggtgccttttataggcagtcaagagttaacatatatttgttgctaatattggcaatttatgttttctatcctttttttcttagatcagtcttgctcagaatcactggttttgttatgttgttgttgttgctattgttattgttcttgtctttttcaaagctcaaatctttaactttcctcatttatttatttaattgagctttagtctttatttttagaaacatagaaatttcttctagctatctggaatatcttcagttttttgaggcaaatgcttagaccattgatatttcagtctgttttctacacatgtactttaggattctaggtttctccctgagccctgctttcgatgtaacactgaatttctgtatgtctttactggttagttactttgatagtttgtatatgcttgacccagtgagtggcaggattagaaggtatggccttgctggaataggtgtgccactgtgggtgtagtcttaagacccttaccctagctgcctggaggccactattccactaacagccttcaaatgaaaatataaaactctcagctctgcctgtgccatgcctgcctggatgctgccatgctcccaccttgatgataatggactgaacctctgaacctgtaagccagccccaatttgttgtccttataaaagacttgctttggtcatggtatctgttcacagcagaaagaacctaactaagacagttaccattcagttcaaaataattcttgattttattgttatttagacatgtgatatttacttttcaacatctggagaattgtttaggttttttttgtgtgtgtgtctttagtaggtattaataaactaaattgagacaactccaaagtatttgcttggtttattgaaaatagcataaacagagccaggtgcttctgtattcatgttttgacaccagtttgtgattgttgaacaatatatcttatttctaaacttttaaaaagctacttaaagacattaacttgctcccttacaatatgttgatggttcagtccattaaatgcttactttgt

SEQ ID NO: 1424 - protein, 304 aa, Mus musculus
MANYEFSQVSGDRPGCRLSRKAQIGLGVGLLVLIALVVGIVVILLRPRSLLVWTGEPTTKHFSDIFLGRCLIYTQILRPEMRDQNCQEILSTFKGAFVSKNPCNITREDYAPLVKLVTQTIPCNKTLFWSKSKHLAHQYTWIQGKMFTLEDTLLGYIADDLRWCGDPSTSDMNYVSCPHWSENCPNNPITMFWKVISQKFAEDACGVVQVMLNGSLREPFYKNSTFGSVEVFSLDPNKVHKLQAWVMHDIEGASSNACSSSSLNELKMIVQKRNMIFACVDNYRPARFLQCVKNPEHPSCRLNT

SEQ ID NO: 1425 - DNA, 90537 bp, Homo sapiens
tgtttagagcatcagtcgaaagcttcatgggttttagagtggctttctgatttttggtagtccatggaagaagagagtttgaaagttgttgtatactgttaatgattgtctgcccatgtcctgctgaaataccatgagtgttgatggacagtatcttttttttttttttttttttttttgagacggagtctcactctgtcacccaggccggactgcggactgcagtggcgcaatctcggctcactgcaagctccgcttcccgggttcacgccattctcctgcctcagcctcccgagtagctgggactacaggcgcccgccaccgcgcccggctaatttttttttgtatttttagtagagatggggtttcacctcgttagccaggatggtctcgatctcctgacctcatgatccacccgcctcagcctcccaaagtgctgggattacaggcgtgagccaccgcgcccggccgatggacagtatctttaataaaactgaatacagtttggcttggggaaaaaaaagccctcctgacagctgccacagacccgtacccaagagcatgtttccagaagttcccactatggggcataaatcccctttgagaacagactgagtctgtcaactgtaagcctttattttcacatttacaatatgaaaatcatcacatgtttacatgatggcagtgttgtgagggtacagttcacaaaggacctgacactcaacgatgttagcaattattgttgaaagaaaaaaaaaaacaagaattatgtatgaattccagcatctcccttttctcccttcaacattgtgccttatttctcagcaaatgagccaacagatgcttgttgatagatggttttagccggtgaatccgatgaagaccttggatctgttggtgaatgtccagcctgttgtcactgagtttgaactgtgggagaaggagctgcttattctgcaggcgttgcttgagtgccaaccacatactgggcatggttctggtgctagggacagagaacttggtatttctggtgaacaaaggcaggcaacggccctgttggcatggagctgcccttctagtgggggaactgaagagaggaggctcccccatttctagaagctttcccagggaaattggctgctttttgcttgacatgtacactcacatgttcttgcagcaagcctgagccacagggagttacatgagatgctcaggctcaaagagctagtgggggtggagagctggtattggagtctgggctctggtggtttgggagaggacatatggcctggaaggagccacgtatacacagtgaagcagaaagaacagaatttctctctctctatatatatatgtatatatatgtttacaatatcaaataatattttttaatcatttttaaagctaacaaagattaggggaaaaaaaggcaagatactaccaaaatgttagtggtagttgggctacgagtgggagcatttttcttctttgctctatttccacttttaaaatgtagttttttgttttttttttaaagacaatctccctctgtcgcccaggctggagtgcagtggcacgatttcagttcactgcaacttccaccacctaggctcaagtgattctcctgcttcagcctcctgagtagctgtgattacaggtgtgtgccactgcgcctggctaacttttgtattttcagtagagacgtggtttcaccatgttggccaggctggtctcgaactcttgacctcaagtgatccgcccaccttggcctcccaaagtgctgggattacaggcgtaagccaccgggcatggctaaaatgtgattttttttttttacttgaatgattttaaaatgactaatgaagttgaccaaagaaagaagaacatgtgtgctttttattctagaaccaatgtttctactaaccagctgtgtggcctggagatagtcatgcctcttgtccccaggtgtccccaaatctgttgttctccccgccgttctgtttatatgctgttccctcctttttgcaaaccttgcttgcccttcaacagcctgctgtggtgtcactgtcttttcaaaggcttcctaaaaactactccgggccaggtgtggtggctcacgtctgtaatcccagaactttgggaggccgaggcgggtggatcacctgaggtcaggagttcatgaccagcctgggcaacatagtgaagccccgtctctactaaaaatacaaaaattagctgggcacagtggcacgtgcctcccagctactcgggaggctgaggcaggagaatcgcttgagcccgggaggcagaggttgcggtgagccgagattgcatcattgcactccagcctgggcaacagagtgagactccgtctcaaaacaaacaaacaaataaacaaacaccactccgattccttctgattccccctgtttgctacatcaccactgcaatattaatgcttatttgttgactacttgctaggggccagacattcagctctgttccctatacacattacctgattcaactctcaaaagaattcaatgacggccacagatatttttcagcctgttcgacagatgagaaacttgtccttcagagaagctttactatttgcccaaatagcaaagcccacccaggtctacctgaccaccaagtgctcttaagtgctgggctatacagggattcctcaaggctagtttatttctgtgccctcaatacttaacacagtacctggcccatggtgggtccttaatatttgttgaataaatgaatatcagaatatgccatttttcaagcctcagtgcagtgtaactatgcacaaataagtctgcaataatgatattaccatatgttgagtgtctagcgtgttctaggtgtgtacattaccaattaatccgcacttcaagctgatgagtagacattgcactgcacctattttacagatgagaaaatagaaattaaaaaatattggtaacttgccccaaatcatactacagcaacagggtgtggtaggaggatctgggtagttccttgtgcattatcttcttccccccaaatataccacagtgttagacgtttgtagccaagcttcttgcctgcagaaagataaaatgcaaaatgagaatattcacaaaccaagtgatgtagcagaagtaaggggctatagggttcctttaggttttattttctcaagtgtttattacatttcacagaaagagaaactaacatctgaaggtgccaaatccctggtgattaataatcagaaaggaagacaaaacaaacttgaaactgtaactgtgtgagtgtggaaaaacccacattctcagctaccgtcagtgagagggccaactggtaccagcctttggctggcaatatctttccaaattataagtgcttgtgtcttttgacccaggaagtccacttttaggagtgtatgtacttggacacctaaaaaatatgctgccacaagaacatttgttgtagcattctgtgctcatttatacaggtctagttaagtaaactctagcatactatacagtagaattctaggggtcatctaaaagaattgggtaagcaacctgtgctggtgtttaatgtcttcaacatacattagtatgtgaggaaagccaggtacacaacaggatatgtcctatgctataatttttatgaaacaatgaaggtctctctctctctctctctctctctgtatgctgcttgttcattaaaatgggaagaggggagttcagggaagaagaaagaattgttttctgaatctagccctttgatctatttgacatttattccacgtgtgtttatcatatttattgtcagaaacaaatagccttttcaaaggggtgtgttttgtggcaggactcagatgtttcatttcacaagctggaaaactataattcctaatggttcagtttcataaacagcaggtggcaaaccttcttgcatggtaactgattttgaaccttgcactataaggatcatgaaagaaagtacatgcccagaacaagagagcagaagaaaggagggaacacagcaaggtcagaaattaacagaaatgaatccagaggcaaaacccacatttctcagtcattcactaactggtttgttcaaccagcatttatagacatcagattgatcccagggtactaagagaataaatttcaattgctgccaacctagccttgtgcaaactcctggtctcctgaggaggggacacccagaagaaattctcagagtgtgcattcctgggctagggggtccagaccagagcctctgagatgggtattgtctcaggagatctgttggcatctatgttattcagcgagaagagtgtacaacaatttgcagatcgaacctagcttgggagctgagtggggttagaaaaggcttcctgaggatgtctcattgaagctgaaacatgaagggtcagtaggagtcagcagggtgagggcatggcatctgtgaagtcccagaggcagaggagagcttgggctggttggggacagagagaaggccagcaggagtggagaagcataggagttgttggggacagaggtgcgcacgcaccatggaggctggagaagcagacgtgggccaacagacaggctgcttgtcatgtccagagcaagaggggagggagtcagaattatgttgtaaaagttatatctttgaaaggggtgacttggaaaaaaaaccccaccaacctgactgtggtatagacaatacatggaggaaggcggaaagagtggaattgggagaatggtggggaagctcttcctgggtgagaaaggaggtgaactttctcttggactaagttagtggcactggagatgaagaaatggatatttaatgaataatttgcaggcagtaggaactgtcgttcatgtggatatgtggaacgagggagaggcaagagtcaaagactgggaaaattctagcttgagtaactgcaggagatgttggttcttttcactgaaatgcaaaagaccagaagaggagctggtttgacagagaaagattaacagtttagttttggacagaatgagtctgcattgcctatgaaagcactcaaatgcaaatgttgtcttttctaacaactctttggtcccttcaggacctcccagccatgagctctctcatcttttcgtgatctctcacccttcttttgcccccgcttcagtttctgtgggacttagatgttatggaccattattaaaatcccatccttgaggagagtggatggcctgaatccaggagtttgaaatcagcctgggcaacatggcgaaaccccatctctacaaaaaaaatccaataagttgtggtagtgcacatctgcagccccagctactcaggagactgaggcaggaggatcgcttgagcccaggaggttaaggctgcagtgagccacgggctcagcactgcatccagagcctgggtgacagagcaagagcctgtctcaaacaaaacaaaacaaaacaaaaacaaacaaacaaaaaccaaaaacaaaacaacccataaaaaccaaaaacaaaacccattcttgcttaaagtttctacttccctgacgtttttttctccgttatatttactggtgttaggggctgaatggtgtacaccccaaattcatatgttgaaatcctaaccctcagtaccttagaatgtggctgtatttgaagatagggtaatagcttcaaaaaggtaattaagttaaaatggggtaattaaagtgagctcaaattcactatgactggtgttcttataaaaacaggaaaattggacacagaggagttcaccgggaagaccacgtgcagacagagtgagaagacagccacttacaagccaaggagagaggcctcagaagaaatcagcctggtgacgccttgatcttggacttctagcctccagacctgtgagtcaatacatttctgttgcttaagccaccccattgtggcactttgttatggcaaccctagaacacaaatacacacagcaaaccccaaccctgtcaaatccaactctgctcactttcacccttctgtttaaacagtggggagtggctgggcaaaagaacgcaacctactaaccgaccttttaaaaaattcctgaccacttgatgataccctgagaacccacagtccatttgctctcctggtctccttccaggtctaccagcaccccaccaactctcagaagatgaccttttcttctcatttcactgagaagcagcagaaaagtacatccacatcatcatcaccaaatccatgaacctcccaacccccaaagctgtgttttccatctttcttctgtgaggtggtggagctcctacccacactctcacctgtgcttcggatacctctcaccaatatatgagtccaggagttcaagaccagcttgggcaacatggtgaaaccctgcctctacaaaaataaataaataaataactgcaaaaaattaaccaggcccatggtggtgcgtgcctgtagtcccagctactcgggagactgaggcaggatgatcgcttgagctcagcaggtcaagggaaattactggagcaattgccaattgtcgcctgcctactgggtcatcccagcatcctacaaacatactgtgataatctcaacttagaacaaaatattctctcctgactgcccagcatcctctagctatggctttatttctcgatttcattttacagaaaagctctccacacacacgcaaaccccagctaacttactgatatcacttatcttctcacatactctcctaaacctgctgtgggtgggctttgtcctcatctttcctctaaaatgattcctcttgtcactatcatcaataactttcagggcacccttcctcttgtctcagggatcatccttcccagttctctttgctgaagctctctcatctttctggcctctgtcacaggagtagcccatggctgagactctgaaactcttctgtttctgcacacactcttcacatgatcttatatatacactcttggctttaagaactgtccatatctaaggtctcccttattagtgtctccagcattaatcccttgcccaaactccagaagcttatacccaagtggctccttgatgcctcctgttgggggtctaatagacatctcaaacttagcacatcaaaaaccaaattcttgattcatgcctcttcccaagaccaaatctacttcacctcccgttttcccatcactgtagattgcagtgctttccttcctttggtcagttacacaaataaaaaatcttggcatcatctttgactcatctctttcttgcaaatgctacatccaattcatcagcaaatcctgctgctgctaccttcaaactctattcagaatccatctttttttttctttgccaccttcattactgctactacagccattgtaactgttctccatccttatcctcctacaatttattcttaataccaaagccagattgatcctttaaaataatatgccagatcaagtcatttggtgacttgtatgggtaaaaataaaatgcacacgaatgggttaaaaataaaatccaaaaacaggcacatagaccaatgaaacagaatagagatctcagaaataagactcacatctacaaccatctgatctttgacagacctgacaaaaacaagcaatggggaaaggattccctatttaataaatggtgctgggaaaactggctagctatacgcagaaaattgaaactggatcccttccttacacctttttcaaaaattaactcaagatggattaaagatttaaaatgtaaaacccaaaactataaaaaccctagaagaaaatctaggcaataccattcaggacataggcatgggcaaagatttcataatgaaaatgtcaaaagcaattccaacaaaagcgaaaatgacaaatgggatctaattaaactcaggaacttctgcacaccgaaagaaactataatcagggtgaacagacaacctacagcatgggagaacattttcaaaatctatccatctgacaaaggtctaatatccagaatctacaaggaacttaaactaatttataagaaataaacaaccccattaaaaagtgggcaaaggacatgaacagatatttctcaaaagaagacatttatatagccaacaaacatatgaaaaaaagctcaacatcattgatcattagaaaaatgcaaaccaaaaccacaatgaaatatcatctcatgccagtcagaatggtgatcattaaaaagtcaataaacaacagatgctggtgaggttgtggagaaataggaacacttacactgttgatgggagtgtaaattagttcaaccattgtggaagacagtatggggattcctcaaagatctagaaccagaaataccatttgacccagcaatctcattactgggtatatacccaaaggaatataaatcattctgttataaagatacatgcatgcatatgttcattgtagcactattcacaatagcaatgacatggaatcaacccaaatgcccatcaatgacagactggataaagacaatgtggtacatatacaccagggaatactgtgcagccacaaaaaggaacgagatcatgtcctttgcagggacatggatggagctggaagccattatcctcagcaaactaacacaggaacagaaaaccaagcactgcatgttctcacttataagtgggagctgaacaatgaacacagggaggggaacaacacacactggggcctgttggggagagtggagggagggagagcatcagaaagaatagctaaaacatgaggggcttaatacctaagcaatggattgataggtgcagcaaaccaccatggcacacatttacctatgtaacaactctgcacgtcctgtacatgtatcccagaacttaaaacaaaataaaaaagataaaaaataaataaaacacacagtccaaaaagtcatcctgtcttacagagctatgggtgatctggtctcctgctactttccgaacttctgttctgtttccctcaaccctctagcctaactacaattggcctccttgctgctctggaacaggccaagagcttttctgcctcagagtctttgcacctgccatttcctctgcttgggaaatgtttgccccaagggagttgggtgacttgatcgctcacattacttaggtctctgcttgaatgtcacagatgttctcttaataaagaagaggcaagaaaagccactttattatttattaaactcccgcatagagtgcagtattattactgtgtgccagaccctgcttcaaacacattccatggactataaaattgcatctctgagcagctcctagagctggtagtaacaacttacatttactgggtgattaccatgtgccaggtattgtgctaaacacgttgtagatattaactcacttaatcctcgtaacaatcccatgaagtaggtactgctactatcccggctttacatctgaagtacagagaggttaagtaacttgccccatgtcatccagcaagaactaaatttgaacccagagcttagccactgatgcctcttgagagaaggagtcagacttaagttgagtctttaaaggtggttgaccaggcatttgtcagagttaagaaagagaggtaggacatccttttccaggcagagggcattgtgtgcacacacgtatagaagcaggcagcccaccctcatgctttccaggaagcaaatgtggctcaggtgtaaagtgcccggttgatgaagggagttagcggagggagtataaggatgtactgtctgcccccttaggacacctgcagaggattaaggtggctgtttctccctggaggtggagtgggtgggtcactgcacaggagcctatagttgttggtcttttaaactcttattggtgtaaccagccacggaactctgaggcaaggggttgggggtgggaagggaaacagagaaaaggcaagtgaaacagaaggggaggtgcagtttcagaacccagccagcctctctcttgctgcctagcctcctgccggcctcatcttcgcccagccaaccccgcctggagccctatggccaactgcgagttcagcccggtgtccggggacaaaccctgctgccggctctctaggagagcccaactctgtcttggcgtcagtatcctggtcctgatcctcgtcgtggtgctcgcggtggtcgtcccgaggtggcgccagcagtggagcggtccgggcaccaccaagcgctttcccgagaccgtcctggcgcgatgcgtcaagtacactgaaattcatcctgagatgaggtgggttggcgactaaggcgcaccggtgggcactgcggggacagcagggccccgcgcgcagggaagccgcccggatcgcccggaaccgggcatcttccgtggcgggtcagccgagagcccgccgggtggtgctgagtagggagtcccgggctcggggctccgcgggccgcttgcaggagcagctggccttggcaccgagcgtgcccgcgggaggcgggggggggcgctgctcggtggctctgctgcgtagccggtgaacacttggcaccgatgcccgccttctgggcaaggtgccctgagcccagcccctcgccgggctgcagcccaccctcggcgcgctcagcccgcttcaccgcttcagggacggaatagaactcgcagatgcagggtgtcgctgacattttcaactttttctgcggtttccgcccgctgtctctgacccgaaagtgcccccggacggttacagaggacacttaagtggtttgcaaagcctgtggtaggggaggagggtgtagaagggccaaaccacggaacttagttttattcatttatataaagcagcactccgattctttttgcgcggcctgaaatgcatgtgaccagagaagtaattaacaaaacaatgtcaacttctaaaaccgagacattacttagatgataaggcgcagcaactcggtgaatctgtacaaaccttggaaaaaaaacacattagtctatgggaccttccagttttctcatgctcctttccagctactaacctctcctaaagggaacaaccactttttggatttgattcccaggcctcgctttcaccgggaaattatcgttgcttgtaaaacagaagaagccgggaaggcaggcagggggagctgctactttacactctgtgctttgggatagcaaaatcccgcatttaagcaatccgaggaaacgagcaaatagacctccctcgcctctccgagcacactcaacagttccggttgcaaaatgtttgcctcctgggcttcccagcgtcccgttagttgttctatttacacataattagatacttaatggagagagaaactagaagttgaggcgttcctccaggctgtattgtaaagtatgaagtgaaatccaaaatgaaatggtaatgttagaaagcaacctcattaaaaaaaaaaaaagtaacactggtcttgaagatctttcaatgtgagtacataaagatctatctcatttcttttgacagcccatagtatttcataaactagatgtaaccatttcctattgacaggaaattagcttgtttccaatttttcaatcccattcattcatccaacaagtatctgttgagcacccactatgttccagacagtgatctagctactgatgacacaagagtgaatgacgaagttctcactcatgaaattttcaccttagttgggagaaacatgatgcaatgaaaatcttcatacatacattgtgtgtacatatgggagtatttctgtaggatagatttctagtgatgaaactgctgagtaaaagggagaattatgcatattttaagttttgatttttccaaattccaggtattccatatatactccaaaatagttgtgccattttactctcccatcatcagtctatcagaggggatgctttcccacaatctcttgaatgctgaatattttcaacttttttacttaagagaaaaaagagcatctaattgttccctcagtatcagtgagtctaagcatcttgtatatgtttatttgccatttatatttttttctgtgattttcctgtccagatacttgatactttctattgagctgcttatttatttcttatgggagatttttatatattttagataatattctctctctcacacacacacgcgcacacacacacacacacacacacacacacacacatacagtcttacagccacatccctgaaatcttgaccttgtgaacatgttttactggcagcactctggactcgatcattgccttgagactatttcttttttgatattctttggaaagactaacaatgacagttttattttcaaacccaacaaatcctggcatggaaatgtttgctcttgattctgcttttaaaaaaataaagaattattttctctctttctttctgcaccttatcagaaacagctaaaagaagtgagttgggccaggcactgtggctcacacctgtaatcccagcactttgggaggcccaggcaggtggatcacttaaggtcaggagtacaagacctgcctggccaacatgctgaaactccgtctctactaaaaatacaaaattagccgggtgttgtggcgcgtgcctgtaatcccagctactctggagactgaggtgggagaatcgcttgaacccaggaggaggaggtagcactgaaccaagatccagcctggccaagagagtaagactccgtctcaaaaccaaaccaaaccaaaccaaaaaaagaagtgagttggcactttcaacattctgcctggaaatctccttaccaaacctataagatcattaggtatattttctgcactttgtattgtgacaggtgacagtgttaccaaactttttaccaggacataatagggtctgcctttcttctagttgctaacaatttcccccaagtccatcttgcctgcactaacagtctcctttagacctctcctctcctgcctgtcacacattcctagtactaatgctacagtatagtagtaagggtctccagagaaacaacatttatataacataatataaatacattaatagagagaaagagattttaagaaattggcttatatcattgtgaagtcgggcaagccccaaatctgctggacaggccagcagcctggagacccagggaagagttgatgttgcagctggagtccaaaggcagtctctggcagaattctcttttacttctgggaccttggtctttctcttaaggccttcaactgattggatgaggcccaccacattatgaagggtaacatgctttacaccgagtctcctgacttaaaatctaaaaaataccttcacatcacaactagatgtgtttgaccaaatatctggataccatgcctgggcgaattgccacttaaaattaatcatcacgtacatgttttaaggttttgttacacaagacctcacttccaagtatcactttctgttttggtcatcagttgctgcataataaacaaccaccctaaaatttagtgacttaaaacaacaatcatttattgtctgccatggttctgtggtttgactgggatcagctgagtggcctgtttcacttggtgtcagctgggggtgtaggcatctgcaacattgtcttggcaggaacatccaagatgtcccacttaacacgatggctcctgggctcagctgggctggtcaggcctcccttcctctctgtgttgccacacggcctctctctatccatgtggcctctccatatggtctctccctggtggaggtgaatttcttcaaggtttctaaactctcaaaagtggagcctggcaagcccactcaaagcttcagatccacaactggcacagcttcccttccacagattctataggttaaaacaatcaccggaccagcccagattcaaaagaaggagaaacaaactccacccctccatggaggaagtagcaaaaataatgtagacagtttttaccctttacatctggatttgttagcttttctgttttcattttcttctggtctttcttttgtccttctcttacacttattttattaccttttatcaattagcttttaagatgataaaaatctaatacatgcctcctggaatgtcttcttgagcctagggacttttgtttaatgatatatcttgaggacctagaatagtgcctgaaatacaatagtcattaaatatttagctgaattaaatgaatggtatataagccagggtattaaaaataacataaacaaagttgtaataaatatacttccccagtgaacgacctaataccattactccccaaaccctcaatttctgtcttgagcatagaaactgttaatttttcctttgtgtagtaggtccttagtatttctttagaggttgtagcactttatcttcctcactgttccttttccttggttgtccttttccaaacatctctcaacaatttctcccaagtccatcttgcctgcactaacagtctcctttagaactcccctctcctgcctgtcacacagtcttagtaatagtgccacagtatagtagtaagggtctccagagaaactcactttctgcaagttttttagtgtgggtaggtgagtattgaagcttgttcttggcgttaccaggttggttctttgagttgaaccaggggcattacatgcggaatattcctgaacagatcacctctggttctgctgtctcaagggccacacacaagagctgccttctgaccaagatgtctctgggcacatgagacctgaaatacacatggccaagactcaacaaagcgtttgctgactgtcagagctgacagcatctcggtactgtgggagggagcccagtgtctggtgatagtcaggacggacccaggtgatgtcaggggtggggtggggcctgcaggagggaatggagagccagcacctaggggaagctgggaatttaggaagatatccagagagtgtaacttcagttccactaatctcacctgggtgaaaaccagccctctccatggatgatggtgattgcaggtactgacgatagctgcagactgctggtggtctaggcaagcatgcagggatgggagcaggcatttctgagagctccccttatccctgccccaagacaaggtgggggccctgtggggaaggactattttattcacttctgcatctccagttgtctaacacattgcttatcacctaacagtctcttaatagaagcttgctatattgagctgccttgagtccacatcatgctggttgaacataagtagaaattgtgggagacttaatcagagaaaatctttcatctgtcttaccttacgttctaatgatcacttctgtgcccacaaggaccatcttttctgattcatgttcatgtcgatttcttttttatttaacttcctcttcaaaatttctggcaggatttcttgggagccaattctccatttttacttccccatgcctcccattttaatgactgtaggattttctcagggtctactcagcaaaacttgttagtacaacatgagcaaaacagcaaatttatgcaaacacttagcaaagacttagctgtctgcctaatgctagggtgagacatgggagattcacaaatgaagaaacacaagcattgatctccaggatcctgcagtgggaggtatgcggaggaccaacctgggaacagagcaacgcaacaccatgtgatctgtaatgaaaaagaggcctgtacacagccaagaggtcactgaggaaggagccattgcttctgtgcagttagtgctgcgctagattctgcagggatgtaagaaatgtacccctatcaaacaagaaagactatgtgaattgctgaatatgtgagtggagtaccagcacaatgccatggagatgcagacgtgccccatgtggtggggcagagtcaggaagcactttaagaaagaaatagcatttcaggtcttcctttaaaggtagaatttcaacaagagggtgctctggagagtgtgtgttaccctgctgagaaaatcctggcggtcaggtaagatgctactgccagggaagattggccaattgattgactaaacccttaaaggtttggggatcttggggaggattctgctggtgagagggtctggacttcctcttggtctgtccacacctggaccttctcagcacacaagagactatgagggtgaccattttgcacaggacagaattccagcatgtttttcccctggagtgatggaatgaccacctgctcaacatcagtgtcctcactgagaccatgagattcagtagagtgctggaaagcttcatgcttacctgtgtcttcttaatgcttagtgttatgattgaaggcttccttcagtcctaccttttgttctggggttctaagaatcttaggtgcaggcgaggcacggtggctcacacctgtaatcccagcattttgggaggctgacgtgggtggatgacgaggtcaggggattgagaccatcctggcaaacatggtgaaaccccgtctctactaaaaatacaaaaattagccgggtgtggttgcgtgcacctgtagtcccagctactcaggaggctgaggcaggagaatcgcttgaacctgggaggcggaggttgcaatgagctgagctcacgccactacactccagcctgggtgacagagcaagactctgtcttaaaaaaaaaaaaatctcaggtgcacctgagacagattgaatgtggaaggggaagtgaaacaggccttccaggtgtggggcctgggtgctgctatagttacaaatggggaagtgagactataggtctcagttacctgtggaaggaagggtagagtggagtacttacgcaaattagctaattctgggagcttggggtgctaccagggtatcagggagaatacagccagggaatagaatcttcttgaagcaaaggctgtttggaagcccccagagtggatgaaaaggctcagtgggaaacaacagatatcaggagagggagaagaagatacctatttctataccttttggccttgtgttttgcttcagacactgttcccagcaaggtcagtggaacccactgctcaaaacacacacttgctccttgttctggtgtcataatagctctgcaagcagtggtggtgttcagcctggagaacgttccttttctttttttttttatcacaataaacactcatggcttctctgcttcttcctttcttctttgtcttaggactcttgaaaaacagctgccaaatgtcagtttagatattttggagggaaaaaagttgggaatcaatgtttacaggttgcctgcaatgtgctggaaactacatagttggttctttttaaactttctctgaatcctgtcaggaaagttccagcaatcacatcttagtgggtccggaattcgtgggttcttggtctcactaacttcaagaatgaagctgtggaccctcgtggtgagtgttacagttcttaaaggtggtgtgtccagagtttgttccttctggtgttggacatgttcggagtttcttccttctggtgggctcgtggtctcgctggcttcaggagtgaagctgcagaccttcacggtgagtgttacagctcttaaggcagcgcgtctggagttgttcgttcctcccatctggagttgttcgttcctcctggtgggttcatggtctcactgtgctcaggagttaagctgcagactttcgtggtgagtgttacagctcataaaagcactgtggacccaaagagtgagcagcagcaagatttattgcaaagagcaaaagaacaaagcttccccagtgtagaagtgtagaacgggacgccaatgggttgccagtgttggctccccccagcctgcttttattcccttatctggccccacccacatcctgctgattggttcattttacagagggctgattggtctgttttacagagagctgattggtccgttttgacagggtgctgattggtgcatttacaaaccttgagctagacacaaagtgctgattggtgtgtttacaaaccttgagctagacatagagtgctgattggtgtatttacaatcccttagctagacataaagattctctaagtccctagtagattagctagacacagagcactgattggtgcatttacaaaccttgagctagacacagggtgctgattggtgcgtttacaaaccttgagccagacacagagtgctgattggtgtatttacaatcccttagctagacataaatgttctccaagtccccactagactcagaagcccagctggcttcacctagccgattgtgcaccaagtcagcaggcggagctgcctgccagtcacctgctatgcacccgcactcctcagcccttggacggtggatgggacgccagggagcagggcgcggtgctcgtcggggaggctccagcggcacaggagcccacggcagggagggtggggggaggctcaggcatggtgggctacaggtcccaagccctgccccgcggggaggcagctgaggcccagcaagaattggagcgcagcgccagtgggccagcactgctgggggacttggcacaccctccacagctgctggcctgggtgctaagcccttcactgtccggggcctgctgcgctcgccggccgctcagagtgcggcctggggagcccacgcccacctggaactcgcgctggcccacgagcgcctctctctctacacctccgcgcaagcagagggagccgactccggcctgggccagcccagagagggtctcccacagtgcagctgtgggctgaagggctcctcaagcacggccagagtgggcgcgcagaggccggggggcactgagagcgagcgagggccaccagcacgttgtctcctctcattagggttggggaaatggaccctgagagagattaagtaatttggtgatattctatagtcactctggctatgtaatttatggagcctagtacagaatgaaaatgtggggctcatttttcaaaaagcaggaaacagcttttcctttcttccagggtctcttcctccacctgccatgctggtgtttggttgctatttaatgttgagccctcttgggcacagggatacttgcagggacagggtgtctgctcatttttctgtagacctcaaaggtgagtcctgaggcttcagggtcactggcctccttttagggagtcacgacgccttgtctttgtacttcaggaatgattacgaatctttgtaggtaaagcggcagaatgccacgtcctctcctggttgccaggacgtgttccttgtggtttaattgccgggtctgccctgcagaccctggctgagcgacagatgaaaggagtactcagacacaggtacgcagtgaaagagcggctaggggactgccgaagagtcagcagtctcgataaactggagctgctcacttttattcagtacagacataatgccgaaagcctggagccaacgcaatctgtgggtaattaacattgttgttccgccgtgcagggagcagtctcgccagaggatgatgaaaggttggtttccggaagtaaacaagcttatttagacaaactcccctacattcccttgtacccactcctcgccctctgcgtcagggtaagagaacagctgccttcagcttattctcccccgaagctttgcagagccttctgacctttcaaaaggtcttcttctttccctatcggttctcccactactctgactgatctcctatatttgatctcaccttaacaatcacttcttagagctgggtcaggaagtatgcagcatgcacctggcactcctagtactgtgcccatgatgggcattgctgattgttcagagcatattggatgagcctggttcagcctcagaatcttccacccagtgcaccatggagatgctaccaattggttggagttgctctgagaggtgacatttccttgtgattctgcattagaaacatgttgtttgtcagccgaaacagggaaacctgacacgttatccgcccccaggaagatcccatcatcattccatgcaccttcagtcctgggagcttactttaaaaaaaagtgactgacatatgagcgcaggtccccaaacagaggggaggcaggatgagaagccagatgaagagagtcaaggtcctggggctgcttagcttggatgaatctgatgggaggtggggtgcatctgagtgttctctgctgatgaagaacagacttgttgcacgggggtaggtgtgtgctgtgtaaacacacatcagaatcaggaccccgaatagtgaataggcaagagtaacagctgaatttgcccagctcatcacaatttaacatcagttttcaaaaaggtaagagcgtggctttcatagcatgcagaatcaacacacatcaaagattgatttactcatttatgaaggaatcagcaaaatgacaaacttagttcagagaatattttgaggctctgagtagatataaaactggttaatgtttctcagggcaataaaaagctataaacgttggggatttcttttttatcagacagaaattatttgcatacttaacagaaaagatctccaagttaccatctaacttcataaggttcgaataaaacttcatagagttattaatgaatggtaaatagaaaagacaaatatatgttttaccagataattaagtaattcttggtaaacctggcaaacagtaccccagtgtgactctgaaaagacatgctgcccatctttttgccttatttccacgttttaggtatttttgtaagatatctattcaataaatatgtattgagctcctatgatgtcccagaaactcttttagatcctggagatatagcagtaaacaaaacagatgaaattcttgctcacatggaacttatattctagtaggggagacagacattgaaacagaaaaatacatagtatggcagatggtggaaagtattaaaaagagtgctgtgtagtgtttacaacttactcatttatgaaggaatcagcaagatgataaactcagttcaaagaacatcttgaggcaccgagtacatttaaaagtggttagtttctcagggcgataaaaagccataaactttggggatttcttttttaggtatggaaacctaaagtaaagaagatgctatggtttgcacatttgtcccctccaaaactcatgtttgaaatgtaatcccagaagtggcaggatgagagattggccctttaggaggtgactgggtcatgagagatctgccctcatgaatggattaatccattcatggattactgattaatacgctaatgggttaatggatcaatgggttatccttggaatgaaatggcaggctttacaaggagaggaaaagggacttgagctagcatgctcaccctcctcaccgtgtgatgccctgtcctgcctcaggactctgcggagttctggtaagcaagaaggctgtcaccagatgtgtcccctaaaccttggactttttggcctccataactttaaggaataaattcatttttaaaataaattacccagcttcaggtattctgctataagcaacagaaaatgactaaaacaggaggctttactggaaggtgtcctcttagcaaagacctaaagaaagagggagagtgaaacatagaaatatctggggagaacatcctaggtaaaaggaacagcatgtgcaaaggccttgaaaagcagcaagccgctctccctctccctctccctctccctctccctctccctctccctctccctctccccctctccctccccctccccctccctctccctctctctccacggtctccttccacggtctccctctgatgccgagccaaagctggacggtactgctgccatctcggctcactgcaacctccctgcctgattctcctgcctcagcctgccgagtgcctgcgcacgccgccacgcctgactggttttcgttttttttttttggtggagacggggttttgctgtgttggccgggctggtctccagctcctgaccgcgagtgatccgccggcctcggcctcccgaggtgccgggattgcggacggagtctcgttcactcggtgctcggtggtgcccaggctggagtgcagtggcgtgatctcggctcgctacaacctccacctcccagccgcctgccttggccccccaaagtgccgagattgcagcctctgcccggccgccaccccgtctgggaagtgaggagcgtctctgcctggccccccatcgtctgggatatgaggagcctctctgcctggctgcccagtctggagggtgaggagcgtctctgcccggccgccatcccatctaggaggcgaggagcgcctcttccccgccgccatcccatctaggaagtgaggagcgtctctgcccggccgcccatcgtctgagatgtggggagcacctctgccccgccgccctgtctgggatgtgaggagcgcctctgctgggccgcaaccctgtctgggaggtgaggagtgtctctgcccggccgccccgtctgagaggtgaggagaccctctgcctggcaaccgccccgtctgagaagtgaggagcccctccgtccggcggccaccccgtctgggaagtgaggagcgtctccgcccggcagccaccccgtccgggagggaggtgggggggggtcagccccccgcccggccagctgccccgtccgggaggtgaggggctcctctgcccggccgcccctactgggaagtgaggagcccctctgcccggccagccgccccgtccgggagggaggtgggggggtcagccccccgcccggccagccgcccagtccgggaggtgaggggcgcctctgcccggccgcccgtactgggaagtgaggagcccctctgcccggccagccaccccgtccgggaggggggagggggggtcagccccctgcccggccagccgccccgtccgggagggaggtggtgggggtcagccccccgcccggccggccgccccgtccgggaggtgaggggcgcctctgcccgtccgcccgtactgggaagtgaggacccctctgcccggccagccgccccgtccgggagggaggtgggggggggtcagccccccgcccggccagccgcccagtccgggagggaggtggggggatcagccccccgcccggccagccgccccgtccgggagggaggtgggggggtcagccccccgcccggccagccgccccgtccgggagggaggtgggggggtcagccccctgcccggccagccgccccgtccgggagggaggtggggggatcagccccccgcctggccagccgccccgtccgggaggtgaggggcgcctctgcccggccgcccctactgggaagtgaggatccctctgcccggccagccgccccgtccgggagggaggtgggagggtcagccccccgcccggccagccgccctatccaggaggtgaggggcgcctctgcccggccgcccctactgggaagtgaggagcccctctgcccggccaggaccccgtctgggaggtgtgcccagcggctcattggggatgggccatgatgacaatggcggttttgtggaatagaaaggcgggaagggtggggaaaaaattgagaaatcggatggttgccgggtctgtgtggatagaagtagacatgggagacttttcattttgttctgtactaagaaaaattcttctgccttgggatcctgttgatctgtgaccttatccccaaccctgtgctctctgaaacatgtgctgtgtccactcagggttaaatggattaagggcggtgcaagatgtgctttgttaaacagatgcttgaaggcagcatgctcgttaagagtcatcaccactccctaatctcaagtacccagggacacaaacactgcggaaggccgcagggtcctctgcctaggaaaaccagagacctttgttcacttgtttatctgctgaccttccctccactattgtcctatgaccctgccaaatccccctctgcgagaaacacccaagaatgatcaataaaaaaaaaataaaaaaaaaaaaaagaatgaatcaagaaaaaaaaagaaaagaaaagaaaagcagcaagccagccagtgtgtttggaatgttctcttatggaaaatttcaaagatatgtaaaactagggctaataatacaattaacccctacttacccattacccaacttcaacaactatcaacattctgctgttcttatttcatctatttacccattaaaaaaaaagtgtactttaaagcgaattccagagtttgtataattttgtctgtaaatctttcagtctgtatctctaaatctttcagtctgtaactctaaaaagaacattaaaaaacacaactatcataccatcatcctacctgacacaactgagtaatttttcatatcatccaatatcgatcagaagtttaattttccatgattttctttaaaatgtagttttataattgatttgttctaatcaagatttgcacattgcattaaaaatatatgtatcttaaatttcctttaatttacaaccatttccctcccccatttaagagtgcatattaatttattaaacagactgggcaattcatcttgtagaatttcccaccttctgggtttggccaattacatccttgtggtgttatttaaaatcctcctctattccctttattatctgttgactgacagcttggccaatcagaatcacttgaacgagctgattacaccccctctttctgaaacgttttcttcccttgagtctgtacacactgttggcttccaaatttatatctccaacccagacctctctccagtacttctgcttgctactgtgtttttcataactttctgatttttttagtatccaatgctagaaaatatatccattttgagaaagagacaaagtatgagctcatattgataatttcatttcaaagtaaagggaacaaagtttttatttaacatgttaattttatgcttgtttctcttttacactgaaaatcttagttctcaatgacattaatataattatgtatttacttcccatatatatgttgtatataattgttttatatatacatatgtgcatatatattattgctaatgaaacgtctactgaatgatgtaagttttctctgtgattcttttggtccttgggacacaggacttatcccactagtgatgtgtagtcaaaatactatgtaccagtgtttgataccttaattaaaggatctctctggctgctgcattgagaacagatggtagcaggacaaggacatcagcctggaagccatctggaagctctttagtgattcagataagatttgattttggcttggatggtgatggatgatgttgagaagtgggtggattctggatatgttttgaaagtaggttccatgtgatttgccatgggctaatatatggaatgtgagagaaaaagaagaaacaacaatgcttccaagattttggggcagaggtactgaaaaaatgaatttccatttatcagaaagagaaagactgtggtaaagcaagttgggaaggaaacagcagctcagttttccacattcagtaaccctcccttatctagggtttcactttctgcagtttcacttatccatggccagccacagtctgaaaatattaaatggaatattccagaattaaacaactcgtaagttttaaattgagcactcttctgagtagcgtgatgaaatctcatgatgtcctgctgtcttctgccctggatgtgaatcatccctttgtccagcatatccatgctgcatgttgtacctgcctgttacttgcctaagcaagtggatggctacttgcttagtgtccatctcagttatcagattgaaaaagcagtacatatacatagggtttagtactatctgcagtttcaggcatcactgagggggttggaacataaccctggcagataagggagactactgttttagtggagatgttgaccagaagactggttcatatgaatatgggggtcctggagagaggtctgggctggagatataaatttggaaatcaacagcgtatacagacacaaggaaagaaaacatttcagaaagagggggtataatcagcttgttcaagtgattctgattggccaagtaagatgaagattggaaattgaccaatggatcggtgacttggcaaggtcagtttgggaggagtggtagtgatgaaagcttatgtggaacaaattcaagaaaaaaacagaagagagaggaattagagattgttgtgcacagacaactcttgcaagaggttttgctggccaggggaacagaaatacaagtgaagtagtggctggatgttttccaaaacatgaaacttagttttcataggaaaaaaatggtttttctttttctacttattcaattttgtgcacaatttcattacattatataagtaaaaaccacaagcacgaacatgtttataaataggtaaataaataacaaagtagatagaaacaaaaattctcaggtgtgcaaaagagtagtttattagctgtgtagaagacagaaaacttgcttttatagagggaatgaatagtgttgattagtatagtgagtcagttaaataggtatcagttgaattttttgagacaataagtacatttagaattggctaggcattattcttccattaaaggaaactcttagtaatagattaggtcagaaaaccacaaagacagttttcttgaataagggggtggtgggaaaaaatggatgtaagatgctgagaaaaaacaggaaactcaacaatagatgaaatcaagaattagtttcgtgtgtgtgtgtgtgtgtatttcacagaaaagggctgaaaggggaggaatggttatattcacagatttttgtagttgatcttaatagggaataggagattacctttttttcagcaaaatattaccagcaaatgtctactctggaaatagaggataagaatcttctatttaaagaccaaaaaggtgaaaactgaggtcagaaatttaaagagtaaatgtagcaagatgctaacattcttgttccctctaataactcttcttttttaaaaattataaaagtaaaacatgcccattgaagaatatttggatgaatacaaaaatatagaaaagaatgtaaaatcgcttaagcccccaagtagaattctaaatagcggagaaacccacgatttaaaaaaataaataaggagatccacaaaaggaagatatatacctgcttaagtggacggcctcagcataagtagtcttacagttacaattaattttttttctattatacgatgttttaaaaaattgctaagctcagttgtctactccctgctagaatgtatcaaacatgctgcatccacatagtagacagttattctacatttttggtctttggatgttttgaagcaattagcaaagtttgatttgaagagacattataaatttccgacggcatatttttctctggccatgatccatatttgccttgatattgtccaaatgttcattttatcttatgactatcaagcaaatattataaagttatttgtgaatttggcacttcatagatgaaatattgtgaaattctgaataaaactgcttcattgattatcttggttcctaaaagagatagtttatgagttaaattatctctaacgttgtctaagttggcagtaattaaatctccatgggaattcttaataaaggcaaagaaggactgaaaacaccttgctgaaactgagagagatttaaaaccacaaaaaaaatgtaagatttagttagttgttcacgttttggggtcctgcttttatgtgttaatacttccagataaaattttttcaaaggtagttttgaaccccaggatctgaatatattaatttgtttatctctgaaaactgtatactttgtgtttcccaggtctggctttcttcatttttcctacttgagggaactccttttcttccttcaatatcctcatatcctccttcaatgtttctcagtcaatatctcctctcaatttttccatttaaaaattaaaaattaaattattaacattttaaatacactgaaatgttcatggaatagtagtacaaatacccatttacccaccacatggagttaatagacaataaaaatttgccatatttgttttacatcttttttctagtttttaaagaaataacatgttacaaataaaatcgaaatactctttccgccgattttcttttctcctgtctcagaggcaaatactgctacttgcttctcttgtatctttttagaaatattctctgcatatataagcatatatccatatatttttccacacatagtatctcttccgtgtcttagtttttttcattctacaatgtatcttgatgatcagtgtagctttgtttcattctaataattatatagattccactttacaaatttactatactttggacttgtatctatgaacgtttcgattgttttaaacctttggcaacattacagacaatgctgcaatgaaatccttctgtatgtatacatacgtggatgtgtgtataagatataattctggaagtagaattgctaagttaaagcatatgctacttaattttgaaaaaattgtcgaacttctcttcacaaggcaattatcttcttgaggtaatgagaactcctatttccccatacccatactacccagagtatcttcaaattttctgatttttgctggtctgataagggaacgttacctcagtttaatctttatttgcatttactatgtgtttttgccctgtagagtgaattttacttttctacctaacaatatatttttgtgattttaatgacattacttttgagatttacccatgctaatatataaactctggttctgcaattttaagtgctatatagtatcctattgaatgaccatactactcatttatttattattatctacttgttaattagtctgttatcttttttgtcagtttttgtgggcataaacaatgctaaagcatacatgtctacttgcgcatatgattttttcccagtgtgtttaatagaatgactaaggtagaatgactaaagttctgaggtgtggcaggtatgccatcttcacctttactgggtatgctagtgtgctgcagctgccgtgataaagtactacaagccgggtggcttcaacaatagcattgtactgtctcacagttctggaggctggaagtctaaaatcaaggtgtcagaagggtcggtgccttctgaaggtgtgagagagaatctgcttcgtgccctcttccaagcttctagtaacctcaggtgttccttgtcttgttgatggtgttgtcccagtgtcttcatattgtcttctctctgtttgtgtttgtgtttgtctctatgcccaaatttccccttttcataaggacccagtcgtatgggattagggcttaccctaatgatctcatcttaacttgatcatctgtaaaaccttatttccaaataaggtcattttctgaggtactgggtgttaggatttcaacatcgtttgggggggtaaaattcaatcaataacaacaggtataccagttaagatgtttttggctgcaactaacagaacattcaactgaaaaggtttaaaatatattgtaaattttaaacaaatgttttatagagatgagttctgactgtgttgcccaggctggtctcaaaatcctggcctcaagcaatccttccaccttggcctcccaaagtgctgggattacaggcatgagccacagagcctggccactttaaaatgttgttgacacacataacaagacatccagaagtggggtggtcataggatcggttcagcagcacagtgatggccgaggctctttccttccactcttccatctcccttgagtggctttcagcttcttgtcacaagattgctgcattatgtcctcatatacctggaacagagggcagggagaggggcaagagcacacccccatttcaagtctcttttcatcccaaagtaacatatttcccagcagccctctttcaaccctctctaggcttctccttaaatttcactggccagaattgggccacacggttacccaaaggtataaaagaggcttgagaagtgagaatttgatattttgaatcataataggagacatgctttgccaataggaaagaagggtaaaagaaatcttctggagagtacggaaccaacggcgtctgccacgttgcatatggccaaatggtcaccaaatttgttgtatcactttattttcacaaaattggtgtaaagtcctcattgctattcatcctcgtcatcattcggaattctcaaatttaaaaaatgcccatttccttgttgttttatttttttaattccctgatcattaacataagtaattatctttttatgtgtttatttgtcattcaggtttcttctgtgaaaagcctatttctgtcttttgcttgttcttatgttgaattgtctctacacattcaggattctaatcttctgtcagttatgtggattgcaaataaagtctcccagtctatggcttaactcttgacactatatttatcacgtcccttatttactaaagatttaaatatgatcaaatttatgttttcttttagggttgtgccttttgtatcttatttaagaactgatttctttaatgtgagatcacaaaagggttataaatattctaaaaatgttaaacttttgcttttcatagttagatctttgatccacttggaatttatctttgtgtgtggtgaaattaggaagcccatttcatttttccccagatggatagtcagttgtgtaagtgctgtttatcaaataatccatcctttatcgagggttttctgatgccacttctgttgcatcttgtgtttctttatgtatgtcagtttatttctggactctccaatctgttttatggtctgtttgtcgctataccactgccacgttgtttaaattactaatgctttgatatccaatagaacatgtctgctttctgttacgggagataaatttacatttttaagaagtttatataaatggaatacatatcatttactcttttgtgtctgagttgtatgtctttgtcatgatgtttttgtgattcatccatgttgtatgtattaatagcttgttcctttttattattgggtctattgtgtgtatatatcacaatttgtttatttatctattgatagacatttggcttgtagtcactttttggatacaatgaatagaggttctatgaacattagtgtacaagttattgtatggacatactgacagagcaggagcacagtcctcttggacaaacactgccactttaagttccagctccatttttagcctcatgcatctcagggaaatcacttctcttctaactacaagtagccagaaagagcaaacagtaaaccacagataaaacagctcaggcacagagggaggagggagaaaagtctcttgggtaactgccacacttcaccctcatacagtgggccccagtaaaacagtgggcgttaataaacacattattttcccttcaggtgcactaaaatagggaagctaaaagcagactcggggggtatgcctgcagctgcagaaaaatgtataaaaacagacacacaactctccctccaaaataagcacaacaaaaaacacaaaagcagtccaagcctctaataaactctcctatcctaaatccttaaaaactcttagtctgtaagagagtgtgctgttgacctagctcagccaaaagctcctcacaggttcgttttctctaaaataaacctgtcttaactggcaagccacctttcgtgttttttttcctctttctttaattcttacacatactgttttatttctcttgagtgaacacccagaaatagaatagcagagccatatggtacataagttgattagctttttgagaaaccaccaaactgttttataaggcaattgtatagttttacatgtgtagcatcagtgtgtgaatattctagttgttctacgtccttgttaacatttggtattgtcagacttttaaattttagccatctaaaaatttatagtgttattttatggtggttatagtttgcatttcccccatgactaatgatgctgaggatcatctcataggctttttgaagtatgtgttcaaatcttttgcccatctttaaaaattagggtttttgttttgtacaaatacttggaaattaagcaacatactccagaatgaccaatgggtcaatgaagaaattaagaaaaataaaaaaacttactgaaaatgatgaaaacatgtctaacaaataaaaattgatacacaacataccaaaatctatggaatacagtaaaagcagtactaggaggaaagttcatagtaatgattgcctacgtcaaaaaagtagaaagatttaaaacaacttaacagtgaacctcaggaaactataaaagcaaaacaacaacaacaaaacccccaaactccaaattagtagaaggaagtaaataataaagatcagaacagaaataaatgaaataggttggaaaagtaatacaaaagatcaacaaaatgaaaagttgttttttaaaaaaaattgactaagcattacctagactaactaagaaaaaagagggaagaaccaaataaatgaaaaaggagatgttacaattgataccacaaaaatataaaggatcgtaagagactattatgaacaccaataaattggaaagcccagaggagatggataaatttctgggcacctacaacctaccaagattgaaccaggatgagatacaaaatccgaatagaccaataacaattattgaggaacctcaataataatttttattaaacaacaataaaaagtttcccaattaaaaaaaaaagctcaggactggatggctttactgctggattctaccaaactttgaaaaataactaccaattcttctcaaactattccaaaaaattgaagggaagagaattcttccaaactcattctataaggccagaattaacctgatacaaaaccagacaaggatacaacaacaaaaaaagaattttgcaggccagtatccctgatgaacataaatggaaagttcctcaacaaaatactagcaaactgaatccaacagcacattaataagtttatttactaaaaccaggtgggattcattccagggatgcaagagtggttcaacatatgcaaatcaacaaacataatacatcccatcaacggaatgaaggacaaaaatcatatgatcaccacaatagatgcagaaaaacagttgataaaattcaacatccctccatgataaaaactctcaaacaattaggtttagaagaaggaacacacttcatcttaataaaggccatatatgacaaatccacagctaatattgtaccaaacagggaaatgttggaagttttttctctaaaaactggaacaagataaggatgcttaccctcactactctgattccacatagtactggaagttctagccagagcaattaggcaacagaaagaaataaaagacatccaaatttggaaggaataagtcaaattgaccatgtttgcagatgacatcctcttacctacagaaaaatctaaagactccaccaaaaaactcttagaattgatatacaaattcagtaaagttgtgagatacaaaatcaacatacaaaaatcagtagcatttctatacaccaataataaactatctgtaaaaggaaccccacttacaatagctaccccccaaaaaaaacctccacctaggagtaaatttaaccaaagaggtgaaagatctctagaataaagactacagaacactaataaaagaaattgaagaggacataaaaaattggatagatatcccatgttcatggattggaaaaattaatattgttaagattccatactacccaaaggaatctacagattcagtgcaatctctatcgaattttcaatggcatttttcacagaaatggaaaaaaagattcttaaatttgttaggaaccataaaagaccccaaatagccaaagcaattgtttgttttattttattttattttattttattttattttattttattttattttattttattttatcacttcatttcattttatttttgagacagtctccctctgtcacacaggttggagtgcagttgcatgatctcagctcactgcaatctctccctcctgggttcaagcaattctcctgcttcagccacctcagtagctagaattacagacatgcactaccatgccctatttttagtagagatagggtttcaccatgttggccaggctggtctcaaactcctgacctcaagtgatccacctgcctcagcctcccaaagtgctggtattacaggcatgagcctctgctcctagccaagccaaagcaattctgagcaaaaagaactggagggatcacactactttactttaaaatataatactatagtaaaacagcattgtattggcattaaagcaacacataaatcaatggaacagaatagagaacccagaaataaattcacatatttatggcctattgattttctgcaacagcactaagaacataaactgaagaaaggacacctttttcaataaatattgctggggaaactggatattcatatgcagaagaatgaaactagagccccatctatcataatataaaaaagtaactcaaaacgaatcaaagacttaagtgtaagaccccaaattatgaaactactaagagaaaacataaggaaaatgttctgagcaaagattttatggataagacctccaaaacacagtcaacaaaggcaaaaatagactaatgggattacatcaaactaaacatttctgtgcagcaaagtaaacaatcaacagagtcatgtgacaaactacagaatgggataaaatatttgcaaacggtttctctgacaaggaattaatatctagaatatacaaggaacttaacagcaaaaagccaaataatctgatttttaaaatcggcaattgatctgaacagacgtttctcaaaagaagacataaaatggccactaagtatttgaaacagtgctctatgtgactaatgattagggaaatgcaaatcaaaatcacagtgagatattatctcacgccagctagaatggctatcatcaaaaagaagaaaaaataacaaagctagcaagaatgcagataaaaggaaacttaaaacatttcagcttttactttagattcaggggttacatgtgcaggtgtattgcatgatgttgaggtttcagaatatgattgaacccatctcccaggtggtgagcatagtacccaatatgtggttttgcaacccttccttcctccttccctccctcctcttatactccccagtgcctagcattcctatttttatgtccatgcgtacccaatgtttagctcccacttataagtgagaaatgtagtatttggttttctgtttctgcgttaacttgtttaggataatggcctccagctgcattcatgttgctgcaaaatacatgatttcattcttctttttgtggctgcatggtattccatggtgtatacataccaccacattttctttatccaatctgccattattgggcatctaggttgattccatgtctttgctactgtgaatagtgctgtaatgaacatataagtgcatgtcttttttttggtagaacaatttattttcctgtgggccatatacccagtagtgggatttctgggttgaatggtaattcagtttttattaatagttctttaagaaatctccaaagtgatattcacagcggttgaactaatttacattcccaccaacagtgtataagcgacaaagaaaattctcacacattgttggtaggaatgtaaattagtacagctattatggaaagcagtgtggaagttccttaacaggctaaaaatagaactaccatatgatccagtaatctcgctactggacctatatccaaagaaaataaaatcatatgtcgaagagatacctgcactcccatctttactgtagtttcatttataataatgaagatatggaatccaccgaagtgtctatcaacagatgaagagataaagaaaatgtgggatatatagacaatggaatgcagccataaaagagaatgaaatcctatcattggtggcaacatggatgagcctggaggacattatgttaagtgatataagccaggcacagaaagacaagtttcatatattctcacttacatgtgggagctaaaaaagttgatctcagagaagtagagagtagaatagtggttactagaagctgagaagggtagggagacagagattgatcaatgaatacaaaattatatatatggatagaggaaataagttttagttttagtgttctatagcattgtagggtgactatagtgaacaataacttattgtatattttcaagtactgagaggagaaaattttgtacattaccagcacaaagaaatgataaacctttgagataatggatatgccaattacacagattcgatcattatgcattgtatgcacgtattgaaatgtcacttcaccccataaatatgtgcaattacatgtcatttaaaagtgataagaaaaattagtttttttgatcttattattgactcgtaggaagcttatatattctgaaaagaagtccattttcagatgtgtactaaaaatattttctttcattttatgacttacctttccattttctttaatggaaacttttaaaaacttttaaaaaacaaagttttaaaaaaatctagttaaggtccagtttgttaacttttttctaatatggcttgtgacgcttattccttctgcctagaatgttcctgggatgtttgtggagctaagtcctcgcttccttcaattctttactcaaatatgtccaccctatttaatgtcaactgtccaccgtatttaatgccaccctatttaatatcactaacacctcctcccccctcactcttgacattcattctagtctattttacatttttttctcatagaactcataaatttctagcatgctttataacttacatattcattatgtttattgtttattgtccgtctttgttccagtaaaatgtaaactcctagaagaacagagacctgtgttttgttcactgatgtaccctaagtgctcacaagtgtttctagcacctagtatttgctcaataaatatttgctaggttgatgaattaatgatttctaagctttccttcagcctgaagagttttctgattgtaagattctacttagataatcctaattgtctcagtgactctcaccagtcactcacttctcccacaaggtggcagtctttaccttcaacacaggttctggtagcctcaaatttgagaattaatagctgagttaacctgcttgttttctttgagcccagacagcctgccctatgggaactgacagctgtaaaatttaaaggacgagtgtaattaccctgcaagatctgagtgcttttaggcaagaggatttagggggtgagagttttcctggagagggacacattatgaaggtgatattgcttaattgatggggactttgaaacatagttgctctttgtgagaatggtataggtttagagagaggtgctagcacagagctgtgacacctgaagtaggctgaccgcagacaaattggatttaaccaccaaatatatctgtgttttcatgtcttcctgccccgtgccctcttatctgactcactttaccccagcactggggaataactgtgccctattctggtcctgacccttttgtaccatctagggaaatgagaactcctcttggggtctcagatcctcatttctgttagaaccaatcctattctgtgggtagggccatggttgtaaatttcctgtgggaggcagcattgctttgcaaaaagaacacagtttggcatgtgaggcagctctgccacttggacaaggtgataacgctttagtctctttatttctaaaacagggaagatgctaataccccgcccatggactagtatgagatttaaatggcaggtacttggcacagtggcaggtggtgaatgctctttggtgatcatgactatccctttctcctggtagtgctgcctcctccctctgagcacctggagtcaatccaccttgggtaggtcagagaaggcagaagaaagtggtgggaggtgaactcgacggaatgatgtacagggcgatagggtgagtgagaggtctgggatctattggcaggagcagaatggtaggaaagggaaaacatgccattgaccttgaatcttgacatttgtgcccatcctatgctgtgttgagcctcaggtcaccgtttgcggaggtgagcagaaaactgctaacagatcgaggcttctccagccttctaggtaaactttcatcagtgggttagttgtcttgttcagaagctgatcacggagctttggccaagcataaacactgattatggcagtccaattgtcataatccctttgattctttaatatcaccttcaagattgtttgttattgtcaatgcccccacaacctaagaccaccaggaacacactgtaattgaaaaaggtgggtttgttgctctctgcaagaagggaggacactcagcatagagactcatgagggtggggcaggttttatccgatgacgttagaaaggacttactgaggatttgggcttgttttaggagatttgggggaaaggttcaaggagactggcttttcctggatgctgccaggaagtagtgggatggtagtaagtctgtggtaggatgtttaaataaatttcctctactgggctggaagaatgagaaggctgaagctgtaataagtaaagaagtggcagtcactcctatcagctatgataaaaggatgtttggctattactttatggtttggatgctatttttgcttgtgttcacatcatggtctatcatggtgataggccacgtacacagtggccttgtctgatgctggtgtcccatggagttgattatgctcagctgaaggacactaaggcccaactgtgggggccaggccagctcctgagtgtcagggggggctgcactgctttgtcattatcaacatctccacatacaatacagcctgtgcatgtgaggtcccagaaggaaggagctaaagcagctagactgggatcactttactcaatttgaggagaggagtgctcttgagggaaccagaggaaggcagatgagctggtctgatctccttttctattggagctctatgcagatagactgaaaatatttgctaaaacaaagagctccatctctagaatacccttagcaggatgtccttgattaaaggattatttctgaaaactaaatccagaatccgtgaggcatgattccctggaagatcatgtaagctgtacaattctctatggaataaattggagacttcatcccttagatccctttgactgtgtgaggaaccccacgaaacctcacttagtgactttattcattcttctgggcctgaaagcatatgtctcatgcaggaaggaaggcaggaccagtggggctttgcaggttgtgccattctctccttgctttgcttgagactctttattacctgtctccctgacattatttgtagtgtgattctgggtgtgttctgtgattcttgtgactaggtatccaattttgcttaaggatgcaaggaagtgtttggggagaaagctctattggaagaggtctgtagtcctagcctccctccccaccccacatttcacatcattagacctcagcacatgggtctggggcaccaacactgtcttacctgttacacagtgtggtctttatctggatgagggatgcgaaaggatacattgtggccaagagacctgggagaggcacaaaaataacaggtgaccaccaagggtgcttggacctgagatgtttccatttcctaagaccctccaagattctccaacatttggtatagttgcccaggcaatttaacaagaaaatcaaatttttgttatgacccccattgtaatttatgcttatcgcagaaaaattgagactataagaaggagaatagaaggtcacaaaaccactctatactagtccagggatagctattcttacaacatggattgatcagtgtggggtgatttctcctagtgttttttggacagagaagcattgaagatgccctggttttaaggtcttaggatgaaggaattatagttgaacagttcaaaatgatgttatgaattactttcagatttgtttgcttgattgcattagccttgcctggccctacggtaactatttggttccatcatggtggctgagtaggtggctctggaaaaagagctattcaagaaaagcttttctttctctaaaaatattgtagggggctcgccctctgttcttggaagcaacgtttgggatggcctcttgggaggctgtctggtgaagtgtctaggggtatgtggtctggacttggacaggacaagatgcaaattctggctgggatattctagttgtggagtgttgggcaagttacttggtcttctgagtttataggtaaactggagataataggtatgtgtgaatgaggatccaatgagatgcctgtaaaacacttagccagatggctgcgtgaagaaagcacttggtaaatgctaattgttgtggttgttataattagtacaatgattagtcattgctgattgttggctaactggcggtaagaaatgaaagtaaagtaaggcagtagcagctgagggaggtggtggagggaatcaggagacacttggaggttctggttctgcctgagtttaagtgctggggaaaactagttgaataactgctggtctaacatttaacagctgtgtgacctcgggctagtcacatttcctttataaacttcctttttctcatttgcgaaatgaaggggtttcgttaggttacttctcatcacccctggttgaccattagaatcgtttgggagacctttttagaaattcttggttctggggtcttccattttccccattctcacttggtgggtctgaaagcaggcactgcagcttttccaaagctcttcaggtgaccttgaagtgtggccagggctgagaacctctgacttccaacagcacttctggtttaggaaggagcaaatcaccggcacagaatgagctctcaggaacggctgctgagctagtaattgccgtgacactgtctccctgtcccaactgcaggcacccctagacgtctcctgatgaagacttccaattttggaacagaagaatctttgaaaaaaatattattgaacttccagaaatgattcattccttctctgctccttctttagttggaaagatctgcccccatccctgtctactgcagtcccaatccctttttatttcaacatatatatccaaaccaacaaaaaaattgactcgcacaaccaaggtgaggtgtttggctttaaggataaaataaatagtttcataaaacctgcccccagatttctcattgcctctactcattttctctaatttgtagggcacactgaaagctcggattcataagatgtagaaagggcagagagttaagttacaaactcttcctaggtctgtttcaactctaacgttctatagctctgctccgtctaaacaaggaattctgttaaatttgtaacctggactttcttgaatactgaggtaatgtttcttgaagtaggatatatatacccaagaagaataaaaataattctggaggtgtcttaattctctgtgggactcaataaaagttttggtgattatatataaacacacttatgaaagcatctggtacatgtaggtgctcagtgcacatgaatttctctttcctgccagatcttttgtagtggaaaattatcttattcttccatctttgtctgcaaagatgctgctaaggaaagatgtagaagagttttacaagggagttggagtatgggaacaggaagttcccaagaaggccactgcattaatagaattgaaacaagatcccctaaaggaaaatcgctgccaaatctcttttctctaaactatccaaaatggtgccccataaattttcattgacattgaagtacataatgtaataagcttttttttccttaaatatataatgtacggagaaaaccaggttgataatggtttcctggcatagctttcaaaggcaagtgtggatgaagtggaaatatggtgcacagatattggaaagaaaccgctgttgaactcttcacattttcatgtataacccaatgattctcaaacctaaacttgcatcagaattgcctggagggcttattaaaacatgattgttggatgccacccttgcattaattaattacacctgcaactgttctatttttaaatggtcacattttaaggtactgggctgaggacttcattatgtgagtttcaaatgggacataattcaacccctagcccaatcctagtgagtggtgagtggtatctcttcgttttgatttctacttccctagtgactaatgatgttgagcatttttatgtgtgtttattagccatttttatatctcttatgaaaaaatgtgtataaaattattggcccatttgttaattgggttatccatttattattgaattataagagctctttactactctggatgcaagtcctgaaacagaaataatatttacaaatattttaatccattctgtgaattttattttcactttcttgatggcgtcctttgaagaacgtaggattttaattttgataaagtgtaatttatgtattttttcttttgttgctgtgcttttggtatcatatttaagaaataattgcctaatccaaggttatgacaattttttattctatgtttgcctctaagaattttctaattttaccttttatatttaggtctttcattcattttgagtcaatttttgtatatggtgtaaagtatgggtcctaatttattcttttgcatgtggatatcttgttgtccctgcaccatttgttgaaaagtgttgttttttttttcccattgaatggccttggcactcttgtctaaaattaattgatggtaactgtaagactttatttctggactctttattccattgatctatatttctatcattgttactgagcaatgtgcttgctgcctgacagatagggaagccaatattatggaactggtttttgagaaaagcaaaagctttatcgtgaggttgacttgcaaggaaacaggatgcaaagctcaaatctgtctccccttctgggatctgggacaagttttatgggttagggagggcaagctggtatgcagaagcactggtagggcaggtttcaactggaagtactttaaacaagaccatttatggtaaggtatggtaagggtcttaacactggacatgcctgggctcaggtttcttgcttttaaaaatgtttgggccctcaggttccagtcatgtcttgaccattttcttctgtggtggggcaggagaggaatttttcttctgggtgttattcaaggttgaggtcttcttttctgcattgcttcggctgcatgacttaacaactttttgactttgtgcctgttaaataacttgacatactattatcatcagagtagggccagttagaactggtcctgtgattacatcattatgccagtaccaattatcttgattactgtagcattgtagtaagttttgaaatcaggaagtttgtgtctttcaactttggtcttctttttcaggatttttggctcttctgtgttccttacatttccatatgaattttaagttaaactgtcactatctgcaaaagaaggaactgggatttttatagagattacattgaagctgtaaatcagcttggagaatactgtcatcttaacaatattaagtcttctggccgggcacggtggctcacgcctgtaatcccagcactttgggaggccgaggcgggtggatcacgagctcagaagttcgagaccagcctggccaacctggtaaaaccccgtctctactaaaaataataataataaaaaactgggcatggtggcatgtgcctgtaatcccagctactcaggaggctgaggcaggagaatcatttgaaccctggaggcagaggttgcagtgagccgagatcgcaccattgcactctagcctgggcaacagggcgagattctgtctcaaaaaaacaaaaacaaaaacaatattaagtctcctgatccatgaatgtagaatgtttttccatttgttcaggtcttctttactttgtaacagtgttgtgtatttttcaatgttccagtcctgtaattctttgttatatttactcctaagaatattaattgttttgctgctattataagtggaattgtttaaattttgattttatatttttcattgatagtatatttttcattgatagtatacaattgatttttgtacactgattttgtaacctgaaaccttgctgaccatgtttactcgttctaacagtttcctttttgtggatttcttataattttctatatacagtatttcatgtcatccatgaaggggataggtttacttcttcttatctaatctggatgagtttagtttatttttcttacctaaattccttggctagaactccaatacaatgttgaatataagtaatgaaatcagacatctttggactgtacttgattttaagggggagcatccagtcttttgccattatgtataatgttagctgtggggtttaatagatgaattttatcaggttgaggaaattttatttctaatctgctcagtgtttttttcatcacaagagtgttggattttgttaatatttttgtgtgtctattgagatgatcatatggtttttgtcattctacaaaatacagcacattaaattgatggatttttacatgttaatttttttttaaattttactttaagttctgggacacatgtgcagaacgtgcaggtttgttacataggtatacatgtgccatggtggtttgctgcacctatcaacctatcatctaggttttaagccctacatgcattaggtatttgtcctaatactctccctccccttgctccccacccccgccgacaggccccggtgtgtgttgttcccctccctgtgtccatgtgttctcactgttcaactctcacttatgagtgagaagacgtggtgtctggttttctgttcctgtgttttttagctgagaatgatggcttccagcttcatccatgtccctgcaaaggacataaactcattcttttttatgactgcatagtattccatggtgtatatgtgccacattttctttattcagtccatcatttatgggcatttgggttggctctaagtctttgctattgtaaatagtgctccaataaacatatgtgtggatgtgtctttatagtacaatgatttatactcctttgggtatatacccagtaatgggattgctgggtcaaatgatatttctggatctagatccttgaggaatcgccacactatcttccacagtggttgaactaattcacactcccaccaacagtgtaaaagcattcctatttctccacagcctcaccagcatctgttgtttcctgactttttaatgatcgtcattctaactggcgtgagatggtatccattgcgattttgatttgcatttctctaatgaccagtgatgataagctttttttcatatgtttgctgggcacataaatgtcttcttttgagaagcatctgttaatacccttcgcccactttttgatggggttgtttttttcttgtaaatttgtttaagttgtagacttaggatattagatctttgtcaggtggatagattgcaaaaaatttctcccattctgtaggttgcctgttcactctgatggtagtttcttttggtgtgcagtatctctttagtttaattagatcccatttgtcaattttggcttttgttgccattgcttttggtgttttagtcatgaagtctttgcccatgcctatgtcctgaatggtattgcctagattttcgtctagggtttttatggttttaggttttacatttaagtgtttaatccatcttgagttaatttttgtataaggtgtaaagaaggggtccagtttttgttttctgtatatggctagccagttttcccagcactattaattaaataggtaatcctttctccattgcttgcttttgtcaggtttgttgaagatcaggtggttgtagacatgtggtattatttctgaggtctctgttctgtttttgttttttgttttttgttttttgttttttttttttgagatgagatctcgctctgttacccaggctggagtgcagtggcacgatctcggctcactgcaacctccgcctccctggttcaagcaattctcctacctcagcctcctgagtagctgggattacaggcatgtatcaccgcgcctggctaatttttgtatttttagtagagatggggtttcaccatgttggtcaggcttgtctcgaacttatcacctcatgatctgcctgcctcagcctcccaaagtgctgggattacaggcgtgagccaccgtgcccggccaaggtctccgttctctttcattggtctatatatctgttttggtactagtactgtagttactgtagccttgtagtacactttgtagtcaggtaacgtgatgcctccaacttcgttctttttgcttaggattgtcttggctatacgggctcttttttggttccatatgaaatttaaagtagtttttttctaattctatgaagaaagtcaatggtatcttgatgggaatagcattgaatctatcaattactttgggcaatatggccattttcacaatatttattcttcctatctatgagcatggaattttttctatttgtttgtgtcctttatttccttgagcagtggtttgtagttctccttgaagaggtccttatgtctcttgtaagttgtattcctaggtattttattctctttgtagcaattttgaatgggagttcactcgtgatttggctctctgcttgtctattattggtatataggaatgcttgtgatttttgcacactgattttatatcctgagactttgctgaagttgcttatcagcttaaggaggttttgggctgagacgttggggttttctaaatatacaatcatgtcatctgcacacagagacaatttgactttctctcttcctatatgagtacactttatttatttcttatgtctgattgccctggccagaacttccaatactatgttgaacaggagtggtgagagaggacatccttgtctcgtgccacttttcgataggaatgcttccagcttttgcccatttagtatgatatgggctatgggtttttcagaaatagctcttattattttgagatatgttccatcgatacctagtttattgagagtttttagcatgaagggatgttgaattttattgaaggacttttctgcatctattgagataatcatgtgatttttttcattggttctgattatgtgatggattatgtttattgatttgtgtatgttgaaccagccttgcatcccagagatgaagccaacttgatcgtggtggataagctttttgatgtgctgctggattcagtttgccagtattttagtgaggatttttgcatcgatgttcatcagggatattggactgaaattttctttttttattgtgtctctgccaggtttcggtattaggatgatattggcctcataaaatgacttatggaggagtccctctttttctattgtttgcaatagtgtcagaaggaatggtaccagctcctctttgtacccctggtagactgcatgttagacgagataatatgtatgaactacctggcatataatagatgcttcctaaataagattctaaaaaataattatgctccaaaaatatttttaaaatcaaataatttatgttttattttctgtgttttatctcagacatgtagactgccaaagtgtatgggatgctttcaagggtgcatttatttcaaaacatccttgcaacattactgaagaagactatcagccactaatgaagttgggaactcagaccgtaccttgcaacaaggtaattgggggcatgccattgattttaaaactggggataaaagccaatggtaacaattcataggtccaaatttttattagaatgaaggaagaggaaaaatccagacattatagtgtgagtgtggttggtaggaatggaatttgcaggccattgaggggccatgatataattaagatttaggacatctggagaagggagctaagagagagaaatagggatacagagataggaaaggggctttggccaaaaactaggcagaaaaaacctaacaccaaacccaactcgaacaaacaaattaacacgacctatataataacaaaactttcccctgacctatgataataatagtagtagtagtagtaataacagcaatgccaagttacacttgcagactgcttcttctttttcttgcttacaaaagactctcctaatccttactttcttaggccttcatagccattctctggaatgggcacatcaggtgtcagcatcccaatttcaccagtgagaaaactgagggttggtgtgtttaggtgaccagtgttgcccaagtttgacaggcttcaaagtgaccagtttaaatgtaaatggtatgagacctggagccacagaggcctggattctaatacattggttatattggaaaagctctatcagagtgcaccttttctatagccaatgtttaaggcaaaattccatgtgcctaaaattttctttgtgaagcccttaaatccatccagaaattacagcctctcattccattgttagtgagctggagtcattgtgaaacttctccattcactaggcgtgatgccctatgcagagaaggtgtttggcaaataataacccaggctgacatttgtcaaataagtgactatgcgatggatagtatgctaagcaatttacttgcatttatctcagttaatttccctagcaccccattagtttatttcagtcattatcattaccattttacaggtgtagaaagtggggcttagtgatgttttggttgctcaaggtgaaacacctgataagtgatgatgatgctgggcttcaataagggctgggattttagggcccatactttaaaccagtatccttcactgactcccattaagaatgaatagggggaggagccaagatggctgaataggaacagctccagtctgcagctcccagtgagaccaacgcagaaggtgggtgatttctgcatttccatctgagatcaggtttcctcgtgtgtctacaccaccagggccctgggtttcaggcacaaaaccgagccgctgtttgggcagacaccaagctaggtgcaggagtttttttcgtaccccagtggcgcctgaaaccccagtgagacagaactgttcactcccctggaaagggggctgaagccagggagccaagtggtctcgctcagcgggtctcactcccacggagaccagcaagctaagaaccactggcttgaaattcttgctgccagcacagcagtctgaagttgacctgggatgatggagctgggtggggggaggggcgtccgccattactgaggctttaataggcggttttcccctgacagtgctaagggggctgggaagtctggactgagtgtggcaacgtggttgtggccagactgcttctctagattcctcctcactgggcagggcatctctgaaggaaaggtaacaaccccagtcaggggcttacagacaaaacctccgtctccctgggacagagcacctggcagaaggggcagctgtgggcacagcttcagtggatttaatcattcctgcctgctggctctgaagacagcagctgatcctgacaagagggattctcccagcacagcacaccaactctgctaaaggacggattgcctcctcaagtgagtccctgacccctgtgtctcctgactgagagagaccacccaacaggggtcgatagacacctcatacaggagagctccggctggcatcaggccggtgcccctctggaatgaagcttccagaggaaggagcaggctgtcatctttgctgttctgtagcctccactcgtgataccttcaggtgcgggaggaacccaggtgaatagggtctggagtggaccccctgcacactgcagcagccctatggaagaaagggcctgactgctaaaagaaaaaacagaaagcaacaacatcaatgaaaaagaccccacaaaaacccatccaaaggtcagtagcctcaaagatcaaaggtagataaatgcaagaagatgagaaagaatcagcacaaaaatgctgaaaactcaaaaagccagtgtgcctcttctcctccagatgatcttaacacatctccaacaagggcatagaactgggctgaggcccctaaaaagagatgagttcatgtcctttgcaggcatatggatgaagctggaaaccatcattctcagcaaactatcacaagatcagaaaaccaaacaccacatgttctcactcataagtgggagttgaacagtgagaacacatggacacagggaggggaacatcacacaccagggcctgtcaggggtgggtgctaggggaggataacattaggagaaatacctaacgtaggtgacgggttgatgggtgcagcaaaccaccatggcatgtgtatacctatgtaacaaaactgcacattctgcacatgtaacccagaacttaaagtataaaaaaacaaaagatactagctacatttacccaatgttaaaaaaaaaaaaagaactgggctgaggctgaggtggatgaattgacagaagtaggcttcagaagatgcataataatgaaattcactgagctgaaggagtatattctaacccactgcaaagaagctaagaaccatgataaaacataggagctgttaaccagaataactggtttagagaggaacataaatgacctgatggagctgaaaaacacaacacgagaacttcaagatgtaaacacaagtatcaataaccaaatagaccaaacagaagaaaggatatcagagcttgaagagtatcttgctgaaataagacaggcagacaagattagagaaaaaagaatgaaaaggaacaaacaaaacctctgagaactatgggattacataaaaagaacctatgactgattggggtacctgaaagagacaggaagaatgaaaccacgttggaaaacacacttcaggatatcatccaggagaacttcttcaacctagcaagatgggccaacattcaaattcaggaaatccagagaaccccagtaagatactccatgagaagatcaaccccaagacacataatcatcagattctccaggtcacctataaagggaagccaattagactaacagcagacctctcagcagaaacctacaagccagaagagattgggggccaatattcaacattcttaaagaaaataatttccaaccttgaatttcatatctagccaaactaagttcataaatgaaggagaaataaaatctttttcagacaagcaaatgctaagggaattcgtcaccaccaggcctgccttgcaagagctcctgaaggaagcactaaatatggaaaggaaaaaccattatcagccactacagaaacacaccgaagtacacagaccaatgacactatgaagcaactacgtaaacaaatcttcacaataaccagctagcatcatgataactggatcaaattcacacataacaaattaaccttaagtgtaaatgggctaaatgtcccaactaaaagacatggaatggcaagctggatagtcaagatcaattggtgtgctgtatacaagagacccatctcacatgcaaagacacacataggctcaaaataagggatggaggaatatttaccaagcaaatgggaaacagaaaagagcaggggttgcaatcctagtttatgacaaaacagactttaaaccaacaaagatcaaaaaagaaaaagaagggtattacataaggataaaggggtaaattcaacaagaagagcaaactatcttaaatatatatgtgcccaatacaggaacaccgagattcataaaacaagttcttagagaccttcaaagagatttagatacccacacaataatagtgggagaatttaacatcccactgtcaatattagacagatcatcaagacagaaaattagcaaagatattcacgacctgaactcagctcaggatcaagtggacctgatggatatctactgaagtctccatgccaaagcaacagaatatacattattattggtgccacatggcatctactctaaaattgatcacacaattggaagtaaattactcctcagcaaatgcagaagaactaaaatcataacaaacaatctcacagaccacagcacaatcaaattagaactcaagattaagaaactcactgaaaaccatgcaattacatggaaattgaacaacctgctcctgaatgactcctgggtaaataataaaattaagccagaaattaagaagttctttgaaactaataggaaaaaagagacaatgtatcagaatctctgggatgcaactaaagcagtgttaagagggaaatttatagcactaaatgcccacatcaaaaagctaggaagatatcaaattgacatcctaacatcacaactaaaagaactagagaaccaagagaaaacaaatcccaaagctagcagaagacaagaaataaccaagctcagagcagaactgaaggagatagagacacaaaaatcccttccaaaaaaaaatgaatgcaggaggtggttttttgaaaaaaaattaatagaatagatggatcgctagctagactaataaagaaaatagagaagaatcagatagatacaataaaatgataaaggggatatcaccacagaaatacaaacaaccatcagagaatactataaatacctctatgcaaataaactagaacatctagaagaaatgaataaatttctggatacatacaccctcccaagactgaaccaggaagaagttgagttcctgaacagaccaataacaagttctataattgaggcagtaataaataccaaccaaaaaaaaaaaaaaaaaagcccaggatcagacagatttataactgaattttaccagatttacaaagaggagctgataccctttcttctgaaactgttccaaaaaattgaaaagtaaggactcctccctaactcattttatgagactagcaccatcctgataataaaaactggcagagatttaaaaaaaaaaagaaagaaagaaaacttcaggccaatatcctgaagaacatcgatacaaaaattctcaacaaaatactggcaaactgaatccagcagcacatcaaaaagcttatccaccatgatcaagttggcttcatcctcaggatgcaaggcaggttcaacgtacatgaatcaataaatgtaattcattacataaagagaactaaagacaaaaaccacatgattatctcaatagatgcggaaaaggccttcgataaaattcaccatcccttcacgttaaaaactctcaataagctaggtatcaaaggaacatacctcaaaataataagaaccatttatgacaaacccacaagcaatatcatactgagtgggcaaaagctggaagcattccccttgaaaaccggcacaagacaaggatgtcctctctcaccactcctattcaacatagtattggatgttctgaccgggacaatcaggcaagagaaagaaataaagtcttttcaaatggaaaaaaggaaataaaattgtctttgtttgcagatgacatgatcctataactagaaaaccgcatcatctcagccccaaagcttcttaagctgataagcaacttcagcaaagtctcaggatacaaaatcaatgtgcaaaaatcacaagcattcctgtacaccaacaacacgcaagcagagagccaaatcatgaatgaactcccattcacaaagggaataaaatacctaggaatacagcaaacaagggaagtgaaggacctcttcatggatacctataatccactgctcaaggaaatcagaaaggacacaaacaaatagaaaaacattccttcctcatggataggaagaatcaatatcgtgaaaatggccatactgcccaaggtaatttatagattcagtgctattcccattaaactactattgacattcttcatagaattagaagaaactattttaaaattcatatggaaccaaaaaagctcatatagccaagatgatcctaagcaaaaagaacaaagctggaggcatcgtgctacccaactccaaactgcactacaaggctacagatgccaaaatagcatggtacttgtacaaaaataaacacatagaccaatagaacagagtagagatctcagaaataaaactacacatctgcagccatctaatctttggcaaacctgacaaaaacaagcaatggggaaaggaatccacatttaataactggtgcttgagaactacctagccatatgcagacaattgaaactggaccccttccttgcaactcatacaaaaattaagatgaattagagacttaaatgtataacccaaaactataaaaaccttagaagaaaatctaggcaatatcatttgggacacaggcacaggcaaagatttcatgaaattgccaaatgcaattgtaacaaaagcaaaaattgacaaatgggatctaattaaactaaagtgcttctgtacagcagaagaaactatcatcagagtgaacagaaaacctgcagaatgggagaagatttttgcaatctatccctctgacaaaggtctaatatccagaatttacaaagaacttaaacaaatttacaagaaaaaaataaacagccccatcaaaaagtgggcaaagaacatgaacagacacttctcaaaagaagacatccatgtggccaacaaacatatgaaaaaaagctcaacatcactggtcattagagaaatgcaaatcaaaaccacaatctcatgccagtcagaatggcattattaaaaagtcaagaaacagcagatgctggtgagattgtggagagatagaaatgcttttacactgttggtgggaatgtaaattagttcaaccattgtggaagatagtgtggcaattcctcaaagatctagaactagaaataccgtttgacccagcaatcccattactgggtataatagaaatcattctattataaagatatgtgcatgcatatgttcattgcagtgccattcacaatagcaaagacatggaatcaactcaaatgcccatcagtgataggctggataaagaaaatgtggtacgtatacaccatgaaatattatgcagccataaaaaggaacaagatcatgtcctttgtagggacatagatggagccagaagccacatcttcagcaaactaacacaggaacatgcaaatgctgcatgttctcacttataagtgggagctgaacagtgagaacacatggacaccaggaggggaaaaacacacactgtagcttgttggggttggggtgaggggagtgagaacattaggacaaatagctaatgcatacttggcttaatacctaggtgatgggttaataggtgcagcaaacccatggcacatatttacctatgtaacaaacctgcacatcctgcatgtataccctggatatacatgcccaggatatacattttatttaaaataaaaataaaaataatagattcataaaacagaatataattctgaactttgactccctgtacctttaagagggacccttaaatttaaaaatctattgtattttttttttagtaggggtagggaatatttagggaatttggaaggggttatatagttctttaagaatcaaatagcacatcttcctgaaaatagcacgtagacaaagtttttttggagataaccttaggaatatcgtaactctctgatgccacctccatatgtgatcctatgttgattataagattttgatcagtggctttcagacttttttgactgcaacctagaataaaagattcatttacattgtgacctagaacacacacacacacacacactctctctccgccactctcctgcacacagaaatcattgatgcttacaacaattcttactcttactatgggtgatttactttgatatgctctgttttttttttcatttacaaaactgtggattaattttttttgacatgctaaattgatctcagtaatagattgtatttattcttccttagattcttctttggagcagaataaaagatctggcccatcagttcacacaggtccagcgggacatgttcaccctggaggacacgctgctaggctaccttgctgatgacctcacatggtgtggtgaattcaacacttccagtgaggctctgggccctgtgggattgcccagggatgtggagggtgaacagagtgacttctgctggaggccctgaatgattagtgtggaggacagagccacaggcacccatcctgatgccatctatacttatattagtccatttgtgttgctattaaggaatacctgaggctgcgtaatttataaagaaaagaggtttatttgactcacagttacgcaggctgtacaagaagtagggtaccagcatccacttcgggtgaaggcctgaggctgtttccactcatggagaaggggaaggggagctggcatttacagagatcacatggtgagggaggaaagcaaggagaggtcaggggaggtgccaggctgtttgtaatgaccagctgtcctgggaactagtagagtaagaactcattactataaggacagcaccatgccattcgtgcaggatcatccctatgacccaaacacctcctactagtcccgagctccaacactgggggtcgaatttcaacataaggtttggagagttaaatatccaaactatagcactacccttaatggcaactcaggctgatataaagtagcattccctgttttcttgaaaaattgacttcagagttggggattgcccatgctccctaattcccttcttttgagtgctcacatagcctgcttccgaattcttggtattttgctctctgtaaggtcatcattcaggtccaaagaagtctagaacaggatgaggtctcagtgggacctagaccaaggttcttgctcttcagaatcatcacagtagccatggactggactcttccatctcaggcactggctttgccatcatttttcagatgtagccttatcctgcccagaaagactcaacacctcaccaggggaagggatttcctacaaccaaaaccctactgcagttttcacttcttttttttttctttttgtttatatggtggatatttttactttatatagttttattcttatttttactgtttttcattgtttgtttttaaaagcttatcttattatagcttctttgtcccaggtttgcattactttcaattacaaaaataaagcatgattatttgaaaaaaaaatacttgcacattacagaaatgcataaaagcaaaaagcaaatgtcactctgaattttcccttcacctcctacctccgcatcacttctcaaagggtaactattatcagcaatttgatatagatctttctagacttttcctatgctaatgtaaacatatatatttaaaatgtacacgcgctgttgtgcaacttgctttattcacttaaaattggtaggtataaagatagctatcctcttttaaaaggctttatcattaagaatcctattaatggatattaagttgctttagttttggttgctattatgtcattattgtaagaaacacttttgtgcgcacacacacacacacacacacacacacacacacacacacctgcatacttgaacgataaatttttataaatgaaacttcaatgttaaaggataaattgtaatagaaactggtaacatgtcatttaaaagatggtaactataccctcatcaagagtatatatatgaggccaggcacagtggctcatacctgcaatcccagcactttgggaggtggaggagggaggatcacttgagcccagtagtttaagaacggcctgggcaacatagtaagaccccatctctattttacactaaaaaaagaaaaaaaaagaatgtatatgagatagtttatttacctatatccccactaacaccaggtattgttactttaaaatttttggctcatttcagaagaaaataatacctcaatttagtgtgaagttctttgatggtgaggctactatatatacataaatggtagattttctgtttcttctgtaagctggcagttcatatattttgaccatctgtatgcggtatctattattttctaattagtagaagttctttataaattaataagagctacgatgtattaagtacttacaaagtgccagtgttccatgtgctacgtaagtagtcactcatttaatcctccacagccccatgaggtcatatggtgatcccattttagagataggaagtctgaggcatggagttaagtaatttgccagccagtaagtggcaaagcaagaagcaaagtttctcagactaacttgagaaactttgctcttaactgccatgtttttctgcccactttctggctcaagttggcgaatatatttttcttattttggactttacacggtgtttatggtctgtcttttgccacccagaaatgcagaaaacctgtctgttctcttccttatagcttctgtgtttcatatcttccttaaaaagatcttcttagagaagcattcttctgtattttcacctactatttttactttcacaatgtttaaaatattttccatatttagatctgagtcttcccacctagaatatggtaatataaatatgtttttccattaatttttttagattttacagtttttcccatgttccatgttttcctttttaaatttcccttttaacaatgactgttttattggtcattcatttaacatttagcttttaaatgtatttacagtagacttctctccttttgttttattttttaatttgttcaatttttcttgaaataaagtagagaaaatgaaataatttatttttaagaactgatttatttacagttcagagttccttatttttgccttcttttaaattgaattatgtatatgtagttttatttatctacattctaatactttggcctcaatttttaatttcttcttattttatagattatctttcaagttcctgatgtatatgtatttatttactttttattctaagttgacaatttataattgtatgtatttgtggggtgaaaaatgaatttatgaatacaatgtgggataattaaatcaagctaattaacatatccaccgcctcaaatactttttttagtttttgagacagggtctcactctgtcacccaggctgaggtgcagtggtgcaatcacaattcactgcaaccttgacctaccaggctcaggtggtcctcctaccttagcctcccaggtagctgggactacaggtgcctgccaccacacttggctaattttttgtattttttttagagacagggtttcaccatgttgcccaggctggtcttgaactcctgggctcaagcgatctaccctcttcagcctcccaaagtgttgggattacaggtgtgagccaccaggcccgacctcaaatacttattttttgtagtgagaaaatgtgaagtttactgtcttagcaatgttgaaatgtacagcacactattattaactacaatcaccatgctgtgcaataaatatttttaaaaaccctttctaactgagattttgtactctttgaccatcatctccccattccttccaacttctggtctctgtatccaccattctattatctgcttctatgaacttgattgttttagattccatatgtattaggacatgcagcatttgtctttctgtgggtggcttattttacttagcatattgttttcttgttccatctatattgtcacaaatgacagaatttctttctttttaaagtctgaatagtattccattgtgtatatataccacactttatccattcgtctattgatggactcaggttgattccatatcttggctattgtaaatagtgctgcaatgaacatgggggagcaggtatctctttgacaaactgatttgaaatcttttgggtaaatacctagaagtgggattgctggatcatatggtagtattctatttttagtttgttgaggaactttcatcacattttccataatgggtatactaatttactttcccaatagtgtacaaataaccccctttcttcacattcttgccaacacttgttatttatctttcatctttttgattatacccttctgacaggtgtgagatgatgtctcattgtggttttaatttttgtttccctattaattaggaagcttgagcattttaaaatatatttgttggccatttgtatgtcttttgaaaaatgtctattcaggtcctttgcccacctttaaattgattttttttcttgtttttgagttgtttgagttccttatgtattttgtttttgtttgttttttaatttttaatttttgtgcatacataataggtgtatatatgggatgtgtgtacatgagatgttttgatatagatatacagtgcataataattacatcatgaaaaatgtctctttccccataagcatttatcttttgtgttacaaacaatccaattttattcttttagttattttaaaacaggggtgtccaattttttggcttccctgggccacattggaagaattgtcttgggccacacataaaatacactaatactaatgatagctgatgggctgaaaaaaaatcgcaaaaaatctcctaatttctaagaaagtttatgaattgaacttatgtgttgggctgcattcaaagctgtcatgggctgcttgagacccatgggccatgggttggacaagctttttttaaaatgtacaacaaaattgttattgactacagtcaccatactgtgctatcaaataataggtcttattcattctaactattttttggtaaccatccccacctccccacaatgtcttgctacacttcccagcgtctggtaaccatttttctattctccatgtccatgagatcagttgttttgatttgttggatgctaaaataagtgagaacatcctatgtttatctttctgtgtctagcttatttcacttaacataatgacctccagttctattcatgttgttgcaaatgacaggaacacattcttttttgtggctgaatagtactccattgtgtataaataccacattttctttatccatttatctattgatggacatttaggttgtttccatatcttggctattgtgaacagtgctgcaataaacatgggagtgcagatatctcttccattgactgattttctttctgttgggtatatatccagcagtggcattgctggatcatataatagctctatttttatttttttgagaaacctcaaaactgttctccatagtggttgtactaattcacattcccaccaacagtgtacaagggttcccctttctccacatcctcatcattatttgttattgcctgacttttggatgaaagccattttagctggggtgagatgatatctcatgatagttttgatttgcatttatctgatggtcaatgatttgaacacattttcatatgcctgtttgccatttgtatgtcttcttttgagaaatatgtattcaaatcttttgcccatttttaattggattattagatttctttcctatagagttgtttgaattacttatctattctggtttttaatgccttcttgaatgggtagtttgcaaatattttctcccattctgtgggctctctcttcactttgttgattgtttcctttgctatgcagaagctttttaacttgatgtgatcctgtttgttcattttgctttcgttgcctgtgctcatggggtattgctcaataattttttttgcccagacaaatgtcatggagagtttccccagtggtttcttgtagtagtttgcagtagtttcatagtttgaggtcttagatttaaatctttaatctattttgattttatttttgtatgtgatttgagataggggtctagtttcatttttatccattgagccactctgtgccttctgattgtagagtttagtccatttacatttgacgtaaatgttatatttttaagtaaggacttactcctgccattttgttacttgttttctgtttgttttgtggtcttctcttccttctttctttcctttctgtcttcctttcagtggaggtgattttttcagtttcctgctttttattttttgtggaactgttatatgtttttgagtttgaagttaccatgaggcttaaaaatagtatcttatatcccattattttaagctgataacaacttaacacagtttgcataaagaaacaaagacagcaaacagaaagctaatacaaactctataccttaacttcattctcccactctaaaactttttgttgtttctatttatgtcttattgtactttatatgtcttgaaaagttattgtagttattatttctgattggctcatcatttagtttttctacttaagacaagagtagtttacacgtcatagttacagtgttataacattctgtggttttctgtgtacttactactgccagtgagttttgtaccttcagatgattaaattgctcattaatatccttttctttctaattgaagtactccctttagcatttcttctaggacaggtctcgtgttaattaaatccctcaccttttgtttgtctggaaaagtctgtgtttctccttcaagtttgaaggatattttcaccagatatactattctagagtaaaaacttttttttttgtctttcagcacttcaaatatgtcatgccactctcatctggcctgtaaggtttccactgaaaagtctgctgccagatgtactgaaactcccttgtatgctatttgtttcttttctcttgctgcttttaggatcctttctttatcttggacctttgggagtttgattatcaaatgctttggggcagcattcttgggttaaatctgcttggtgttctataaccttcttgtacttgggatattgatatctttctctaggtttgcaaagttctctgttattattgctttgaataaactttctacctgtatctctttttctacctcctctttgacaccaataactcttggatttgcccttttaaggcaattttctagatcctgccagtgtgcttcattgttttttattcttttttcttttgtctcctctgactgtgtattttcaaatagcctgtcttcaagctcacaaattctttcttctgcttgatcagttctgctataaaaagactctgatgcattcttcagtgtgttatttgtacttttcagctccagaatttctacttgattctttttaattatttccatctctttgttaaattcatctgatagaattcttgaatttctttcagtttcctcaacatggctattttgaattctctgtctcacatatctctgtttcttcaggattgatctctgatgtcttatttaattcatttggtgaggtcatgtattcctggatggtcttgatacttgtagatatttttctgcatctaggcattgtatttattgtagtctttacaacctgggcctgtttgtacttgtccttggaaaggctttccagatattttgaaggactcggatgttgtgatctacgttgtatctgctgtagggggccctgcaagcctagtaatgctgtgggtcttgtacacactcatggaggtaccaccttgatggtcttggacaagatctagaaggattctctggattaccaggcagagattctttttctagtccctttactttctcccagagtctctctctttctgttctgacccacataaagctggtgacacactccaccgcaactaggactttgctgggtaagacttgaagccagtacagcacttgcccagggcctgcagtaaccacttcctagctgccatctatatttgctcaaggctctggggctctacaatcagtaggtgagaaagccagccagacccgtgttcttctcttcaggttggcaagtttcccaaggccctgggttggtccagaggtgccatccagaagccagggactagagtaaaaaaccttagaagtctacctagtattgcattgtactgtgactaagctggcattcaaaccacaagacacagtccttcccatgctgtcttccccttttctaaggcaaaggagcctcacctcatggccaccaccaccacaggcccacagggagtactgccagtgtactgttaatattccaaggcccaaggactcttcagtcagcttgtggttaatgctgcctggcctgggactcacccttcaaagcagtgggctcccctctggcccagggcaggcccagaaatgctatccaagagccacatcctggaatcagggaccccaagcccagttggtgctctacctctctgtggctgtacctgaagccagcaagtcacagagtctcacccaaggcccatgacatactaattgggtatcacttctggtttttcagggcccaagggctcttcagttagtaggtgatgaattctctccagatgtcgttgtgaagataaaagaggtttattttcatgaaaacatatatactttaaagcaccttatgaaatgtatgtccattccaccatcaacatttttacctctgttgggaagataattccttttgactccacaataattatttatatctacacatgggaatgtttcttttttatttgtgtggttttggttttaaagcatttaatcattacaagactcctagaattactatatcatgtgctctctgaaggcaaagttcccatctaatttttctattttatctttctacctctaagacctaaaactcaataaatgtgcattaaggcagatatccttgggagaagtgacacagaaactatgtattcatgctctgtgtccattgtacttcactcagggttaagactgccttgatgagggcaagtgtaggaagactctgaggccatctgagagtaagtggtgaagacttaagaagtggggcaggaaacacagcaagagagagttgtcaggaagcagaaaagcagttggcaaaagcaaccactgaaggactggttttacctctaattcttcctggactggggataatcctagagggcttgtctctgtcagatgaacttttggtagcatttcccagaaccatgactcaaaacttgccactgtgttcccatctgggatttggaagataaggtaagaacttggaaagaattcaggggacacttagttaaattgggtcaaaatgtgtccattctccagcctccgtcttggcagtgacacattggaaaatggttccactatgactgaacagccagggaagagtacagcttatttatactctctgttttccactttattttctacaaactatgtcttttagaaataaactatcaatcttgcccagactggagaaaggactgcagcaacaaccctgtttcagtattctggaaaacggtttcccgcagggtaagtaccaagtagtgaaattctagagctttggagaccacagaacttaagacgttactcagtcagtgcttggttttaacacttttggattacaaatacttttaggaatgaaaatataggattcattcctgagaaaaaggttcagatgcacatgccagaaaatttacacatccaattttagaacattcttagagggtccatgggctccagttgcagaatctttgcacgtacccactctgactttggctaccaggaacctggggcttggtttaatcctctgattcaggtattagtcaatcttagatacctgggacagtcgtaacaatctacatgtatagaccccttactatgtggcaggtacggtcctcagatctttacatgaactagtaacttgcatcttcaccagaaccctgtgaagcaggtgccatgagtattgtaaccatttaacacataacgtgaaggtacaagtaaacaaggaatctactaaatgtacagaattagtaagaggcatatgtgggagtttatcccaagctgtctgactccagattcagaatctaggctgggaaaaactcaccactccaccctctacctattttttttaaaaaaattgatacataatagttttacatatttatggggtatatagtgatgtggtgatacatataaggtatagtgatgaaatcggggtaattaacatatctgtcatctcgaacatttatcatttctttgtgttgggagcattgaatatcccccttctggctagctgaaactacatattattaactgtagtcctcctacagtgttattgaacaccagaatttattcctcctatctaactataattttgtatcttttaacaaatctctacctatctcctcctcctcctacttttctaagcctatggtggcctctgttctgccttttacttccataagatcaacttaattttagcttccatatatgagtgagagtatgtagtatttaaccatctgtttctggcttacttcacttaacataatgccctccagttccttccatgttgctgcaaatgacaggaatacttttttttttttttttttttttttttttttgagatggagtcttgctctgtcacccaggctggagtgcaatggtgtgatctcggctccctgcaaccaccacctcctaagttcaagcgattctcctacctcagcctccccagtagctgggactgcaggtgtgggccactatgcccggctaatttttgtattttcagtagagacggagtttcaccatgttggccaggctggtctcaaactcctgacctcaggtgatccgccagccttggcctcccaaggtgctaagactacagccatgggccaccatgcccggctaatttttgtattttctgtagagacagggtttcactatgttggccaggctgtctcaagctcctaacctcaggtgatctacccaccttggcctcccaaagttctgggattacaggggtgagccactgcacctggccaggaatacattttttaattcctgaatacaattccattgtgcacatatacccccatctatttctaactttactcaaagctacctgtgtatatttatttatcttgtaagttgcttcagtgttaagtggacaaggaaacatttcttttcaagtgtgttagggaaaaaaagagaaaggaaggaagaaagaaatgaaagaaaaaggtgtgagtaacaatacactaattataactttcaaaattaaacttagacatctgaggaactggggcaggtggaaatgtatttgttaagtgcatatgtcttagtccatttgtgctgctatcacaaactacctgagacttggtaatttttttaaaacaggagttttattttctcattgtgctggatacttgggaaatccaggattaaggtgccagcagattcaatgtctggtgagggctgctgtctgcttccaaaatggtgccttcttgctgtgtccttacatggcagaggcagaggggctaaaggaacctagctagttccctggagccctttcataagggtgttaatcccattcatgagggcagaacccttagggcccaattatctcctaaaggactcactacttattaccatcacattggtcttaggtatcaacataagaaacacatacattcaaatcatagcagcatatctgtgacaagccttgaagtagttcctctgtcattcccattgagtcatccccataggtagtgtgacaaatccctacattaaaggtgaagaaactaagactcagaagttaagtgactcatccaagttccctgggctaataagttacagacctaagagcctaacctaggcctccctgattccaaagccatgctcttcaattttgttctttgaatctgcttattggttctgtcttttaaatgacaggtttgatcttaactctaggttggtacctagctaaatctctgtcttagggggattcatgtaaaccctggtacgatggaaacagaaaaacagcctggaagttgacataaggagaccatgtttaaacttgggcagattcctttactcattctgatcttctgattcctcatttgtcaaatggaaatcaaaatatacttgttccatagggttactgcaatgtttaaatgagataccaccatcctataacataacccaaaatccacccacttcaaaaataattcattgagtacttactatggacagtgaacattcatgggcactttatagtttttgtttgtttgctttttctgagaatagtttccatttcactactctatggtatgttttaggacagtgctgttgctaaaatcttttaaagccaagtcacattttatatgtatcaagaacctccttgcgttccccactcagtccctggcactaggaatacagaggtgcacgtgattgaaggcgtcctgcccttgtgagctaccagcacctttattttgccaatcactcatggatgtatgtggatggacttcttttttcagacttgtccctttctttttctgataacagaggctgtgtttttttttaatttttaatttttgtgggtaggttaaactcatcattataatacaatacagttggataatgtggagggaatgtaagatgctgtcagagtcagagaaggggacttgagctagtcccaggggttggggaggcctcctggagggagcatatagaacactattttgttcatttcatttttccaaagtctaacaaagattcctgctgaatgtttcttgcatggagaaataagaccctttgctcaagcatatttattcattcacttattcagtcctcctttctctctgtgcttttccaggcctaagggtcccctgttctctcctcaggttcccctcttatggtgttcccatttccctcatccctgaatcatccacctgttcccactaaatgaagcataatgtttacagtgcatgacactgagaaagcactttcatcttccccctctagacattcctcttactcctctggacttctgacttctgaaccactgaaccaccagctctatgaactataacactgaacattgttcacttagagattggagcaactgcttcaagaactctgatatgaagcataatccgtccagtggcttggaataaaaattgtgtagacctgacattcctgggctaaaaccatatgggatatccttccttaaccagctattgctaagtattgttttgaatgaaactgctggaggatggtgattaagtttgcatgatgaatggtgggcatttttttttttaagtttgcagaagctgcctgtgatgtggtccatgtgatgctcaatggatcccgcagtaaaatctttgacaaaaacaggtacacatttattttgcatcctgtttgcaagtatcctgttgcaaatatcacagtgaatatttcatctctagaaagaatatgcttttcatgtttcaggtcagttctgaagattagggccaaaaaaggtaaaaattttgaattccgtggagagagttgtctcctgtcaatgtgtttgtctgatttctcctttgccaaaaattgtctaccaggttctaatggccactgcactgtatctagcccctgctcttaacttttgcaggcctggtgtaattttctcagctttctctcccgttaccctccaccctacccattgctcaccattgttcacaccgttcccccatatgacctgcctcccctgctcccctgctcccttctgtctaaatcttcaccatccatgaagacctgccttgaccctcctctcctccaggaaaattgtgtaccccaattcagtagtaaaactactaccgggaacatcgggaactgtgctgggctcttggccttcactatctttttgcagacattgtcaacaatgtactgtagtggttgaaagcaggtactggcggtcattacatatcatctgtgtgacctcaggcagggcagtcaacctctgtgagcccctgaatatgtaccaaagagttgatggtgatgggaagattaactgagacaacagatgaaaaatgctgagctctgtgcctgacaacagagaaagtgctcaatgagaatcagctattattctcatttgctgatccttgccactgaatctggccacacctgtgccttccttggctgatctccttctatatttacagtttttactatgttgattaccttttcggcctttgttctctaatttttgttctctaatcccacataaggctgactgaaaggaggaagcatatattaatttgccttataaactctaggtgccccaaattaatttttcttctctcctgttttaatatttaattctacaaggaagcatttgtcctttcgtcttctgatcccaatttttttgggtaaaagcattaacatttcagaattttatgatctgatattatggttcaagcacttgaaacaggagtgtcagttgtcagagactaacagggaagagtttaggaatgggattagggcaggcaaccatagtctttcaaagcattgcctctcaaacttcactgagcatgtgaatcacgtggggattgttcaactgcagatcatttcagcaggttatagtggttgaaattctacatttcttttttttttttttttttttttttttgagatggcgtctcgctctgttgcccaggctggagtgcagtgacacggtctccgctcactgcaagctcagcctcccaggttcacgccattctcctccctcagcctcctgaataactgggactacaggcacccaccaccacgcccagctaattttttgtatttttagtagagacggggtttcatagtgttagccaggatggtctcgatcccctggcatcatgatctgcctgcctcggcctcccaaattgctgggattacaggcatgagccaccatgcctggctgaaattctacatttctaatgagttcccaggtgatgttcattaggttggtctaaggaccactcttcaaatagcaaatatttaaagaatcaacattaatgcacaaattaagaattttattttgagaatcttgttaaccgagggtcatgctgaataagaaaaggttattgactgatttgcaatttgatgtgtcaactctaaaggataggtcctagccagtgcctttctgcctgctggttgttgaggggggtgtggatgctttcgtttggggttgatgtttggggttctttgtttcttctattttagcacttttgggagtgtggaagtccataatttgcaaccagagaaggttcagacactagaggcctgggtgatacatggtggaagagaagattccaggtatatcttactactttgtacccaagtgttattttatgaatcagtccacaaaagaatccacagtcacaagcacgcactgggaacaaattgactcaggaaatgaaactacatgaatgtgcatgaatcccaacagcctcttaactttatctccacaaaggatatttaactgcttgacacttcagctctcctgctgacccaggagctcttagaggatttacctctactttacctctttatccaagggccttgtccagggcgtgctacaaaaacaaagagactccaaaaatgtttgtgagatcttgtaattttaatactttcttctttcttccccagagacttatgccaggatcccaccataaaagagctggaatcgattataagcaaaaggaatattcaattttcctgcaagaatatctacaggtaattaatttcttcttgaagaaaaaaatgactgtcttgtcacctgtagaatttccttttttccttagcctcctctgagcttggagggctgtgtgaatctttcttgggccttgatgatgatcacagatggcaacctctggtgatctctgtccctccttccaagccgagtccagaaggtatccaagctagtggccttcacttggctgcctttcctcatccgtctctattgatcccaagtaggacttgcctctaaagctgacacaacctttgatggcatattttttcattcccagtgtgagtggcccagtccagggttcactggcctactaggtttcaggggagcaagggaatgttttgctaagccctttctcccaagttgtaaaatccttgtgacttgacatcattttgcaagtgaagcttccttagttggatctgagtacagatgcctaacacatgacaaggcgtcacacggcagtctaccaaaatctatattttttaaattaaaaaaaaaagtatttacaaaatttttctgataatttgtgtttattagaaaacagtttaaaattacagatagatatatattttttaaagtcacatataattctagtttcaaaactgagacccctcactcatttttaagcagttgtgaccaatggtgtaggtaggtactcattggtagaagcatctttggagatttttccacgtataatagcttggaacaagattgatgcagagaggaaaagctgttcaaaggaggtagaagctgagatgctagaatattgttcctgtttccatgtcactaccttctctcactaaccacatcagaaaagcagaaggatagattctggagactctactgatggcttttgtttcccaaatgacctgaattccccatgagtcaccttgcttctatctggaaacagccagaaaaggccatgagcattctacagcagttagacaggaaaacagaaagaatgaatgaaggagcaactgtaaaagcaatcttgcggcggaggagccaagatggccgaataggaacagctccggtctacagctcccagcgtgagcgacgcagaagacgggtgatttctgcatttccatctgaggtaccgggttcatctcactagggagtgccagacagtgggcgcaggccagtgtgtgtgcacaccgtgcgcgagccgaagcagggcgaggcattgcctcacctgggaagcgcaaggggtcagggagttccctttccgagtcaaagaaaggggtgacggacgcacctggaaaatcgggtcactcccacccgaatattgcgcttttcagaccggcttaagaaacggcgcaccgcgagactatatcccacacctggctcagagggtcctacgcccacggaatctcgctgattgctagcacagcagtctgagatcaaactgcaaggcggcaacgaggctgggggaggggcgcccgccattgcccaggcttgattaggtaaacaaagcagccaggaagctcgaactgggtggagcccaccacagctcaaggaggcctgcctgcctctgtaggctccacctctgggggcagggcacagacaaacaaaaagacagcagtaacctctgcagacttaagtgtccctgtctgacagctttgaagagagcagtggttctcccagcacgcagctggagatctgagaacgggcagactgcctcttcaagtgggtccctgacccctgacccccgagcagcctaactgggaggcaccccccagcaggggcacactgacacctcacatggcagagtattccaacagacctgcagctgagggtcctgtctgttagaaggaaaactaacaaccagaaaggacatctacaccgaaaacccatctgtacatcaccatcatcaaagaccaaaagtagataaaaccacaaagatggggaaaaaacagaacagaaaaactggaaactctaaaacgcagagcgcctctcctcctccaaaggaacgcagttcctcaccagcaacagaacaaagctggatggagaatgattttgacgagctgagagaagaaggcttcagacgatcaaattactctgagctacgggaggacattcaaaccaaaggcaaagaagttgaaaactttgaaaaaaatttagaagaatgtataactagaataaccaatacagagaagtgcttaaaggagctgatggagctgaaaaccaaggctcgagaactacatgaagaatgcagaagcctcaggagccgatgcgatcaactggaagaaagggtatcagcaatggaagatgaaatgaatgaaatgaagcgagaagggaagtttagagaaaaaagaataaaaagaaatgagcaaagcctccaagaaatatgggactatgtgaaaagaccaaatctacgtctgattggtgtacctgaaagtgatgtggagaatggaaccaagttggaaaacactctgcaggatattatccaggagaacttccccaatctagcaaggcaggccaacgttcagattcaggaaatacagagaacgccacaaagatactcctcgagaagagcaactccaagacacataattgtcagattcaccaaagttgaaatgaaggaaaaaatgttaagggcagccagagagaaaggtcaggttaccctcaaaggaaagcccatcagactaacagcggatctctcggcagaaaccctacaagccagaagagagtgggggccaatattcaacattcttaaagaaaagaattttcaacccaaaatttcatatccagccaaactaagcttcataagtgaaggagaaataaaatactttatagacaagcaaatgctgagagattttgtcaccaccaggcctgccctaaaagagctcctgaaggaagagctaaacatggaaaggaacaaccggtaccagccgctgcaaaatcatgccaaaatgtaaagaccatcgagactaggaagaaactgcatcaactaatgagcaaaatcaccagctaacatcataatgacaggatcaaattcacacataacaatattaactttaaatataaatggactaaattctgcaattaaaagacacagactggcaagttggataaagagtcaagacccatcagtgtgctgtattcaggaaacccatctcacgtgcagagacacacataggctcaaaataaaaggatggaggaagatctaccaagccaatggaaaacaaaaaaaggcaggggttgcaatcctagtctctgataaaacagactttaaaccaacaaagatcaaaagagacaaagaaggccattacataatggtaaagggatcaattcaacaagaggagctaactatcctaaatatttatgcacccaatacaggagcacccagattcataaagcaagtcctcagtgacctacaaagagacttagactcccacacattaataatgggagactttaacaccccactgtcaacattagacagatcaacgagacagaaagtcaacaaggatacccaggaattgaactcagctctgcaccaagcagacctaatagacatctacagaactctccaccccaaatcaacagaatatacatttttttcagcaccacaccacacctattccaaaattgaccacatagttggaagtaaagctctcctcagcaaatgtaaaagaacagaaattataacaaactatctctcagaccacagtgcaatcaaactagaactcaggattaagaatctcactcaaagccgctcaactacatggaaactgaacaacctgctcctgaatgactactgggtacataacgaaatgaaggcagaaataaagatgttctttgaaaccaacgagaacaaagacaccacataccagaatctctgggacgcattcaaagcagtgtgtagagggaaatttatagcactaaatgcctacaagagaaagcaggaaagatccaaaattgacaccctaacatcacaattaaaagaactagaaaagcaagagcaaacacattcaaaagctagcagaaggcaagaaataactaaaatcagagcagaactgaaggaaatagagacacaaaaaacccttcaaaaaatcaatgaatccaggagctggttttttgaaaggatcaacaaaattgatagaccgctagcaagactaataaagaaaaaaagagagatgaatcaaatagacacaataaaaaatgataaaggggatatcaccaccgatcccacagaaatacaaactaccatcagagaatactacaaacacctctacgcaaataaactagaaaatctagaagaaatggataccttcctcgacacatacactctcccaagactaaaccaggaagaagttgaatctctgaatagaccaataacaggctctgaaattgtggcaataatcaatagtttaccaaccaaaaagagtccaggaccagatggattcacagccgaattctaccagaggtacaaggaggaactggtaccattccttctgaaactattccaatcaatagaaaaagagggaatcctccctaactcattttatgaggccagcatcattctgataccaaagccgggcagagacacaaccaaaaaagagaattttagaccaatatccttgatgaacattgatgcaaaaatcctcaataaaatactggcaaaccgaatccagcagcacatcaaaaagcttatccaccatgatcaagtgggcttcatccctgggatgcaaggctggttcaatatacgcaaatcaataaatgtaatccagcatataaacagagccaaagacaaaaaccacatgattatctcaatagatgcagaaaaagcctttgacaaaattcaacaacgcttcatgctaaaaactctcaataaattaggtattgatgggacgtatttcaaaataataagagctatctatgacaaacccacagccaatatcatactgaatgggcaaaaactggaagcattccctttgaaaactggcacaagacagggatgccctctctcaccgctcctattcaacatagtgttggaagttctggccagggcaatcaggcaggagaaggaaataaagggtattcaattaggaaaagaggaagtcaaattgtccctgtttgcagacgacatgattgtttatctagaaaaccccatcgtctcagcccaaaatctccttaagctgataagcaacttcagcaaagtctcaggatacaaaatcaatgtacaaaaatcacaagcattcttatacaccaacaacagacaaacagagagccaaatcatgggtgaactcccattcacaattgcttcaaagagaataaaatacctaggaatccaacttacaagggatgtgaaggacctcttcaaggagaactacaaaccactgctcaaggaaataaaagaggacacaaacaaatggaagaactgctcatgggtaggaagaatcaatatcgtgaaaatggccatactgcccaaggtaatttacagattcaatgccatccccatcaagctaccaatgactttcttcacagaattggaaaaaactactttaaagttcatatggaaccaaaaaagagcccgcattgccaagtcaatcctaagccaaaagaacaaagctggaggcatcacactacctgacttcaaactatactacaaggctccagtaaccaaaacagcatggtactggtaccaaaacagagatatagatcaatggaacagaacagagccctcagaaataatgccgcatatctacaactatctgatctttgacaaacctgagaaaaacaagcaatggggaaaggattccctatttaataaatggtgctgggaaaactggctagccatatgtagaaagctgaaactggatcccttccttacaccttatacaaaaatcaattcaagatggattaaagatttaaacgttaaacctaaaaccataaaaaccctagaagaaaacctaggcattaccattcaggacataggcgtgggcaaggacttcatgtccaaaacaccaaaagcaatggcaacaaaagacaaaattgacaaatgggatctaattaaactaaagagcttctgcacagcaaaagaaactaccatcagagtgaacaggcaacctacaacatgggagaaaattttcgcaacctactcatctgacaaagggctaatatccagaatctacaatgaactcaaacaaatttacaagaaaaaaacaaacaaccccatcaaaaagtgggcgaaggacatgaacagacacttctcaaaagaagacatttatgcagccaaaaaacacatgaagaaatgctcatcatcactggccatcagagaaatgcaaatcaaaaccactatgagatatcatctcacaccagttagaatggcaatcattaaaaagtcaggaaacaacaggtgctggagaggatgcggagaaataggaacacttttacactgttggtgggactgtaaactagttcaaccattgtggaagtcagtgtggcgattcctcagggatctagaactagaaataccatttgacccagccatcccattactgggtatataaccaaatgagtataaatcatgctgctataaagacacatgcacacgtatgtttattgcggcactattcacaatagcaaagacttggaaccaacccaaatgtccaacaatgatagactggattaagaaaatgtggcacatatacaccatggaatactatgcagccataaaaaatgatgagttcatatcctttgtagggacatggatgaaattggaaaccatcattctcagtaaactatcgcaagaacaaaaaaccaaacaccgcatattctcactcataggtgggaattgaacaatgagatcacatggacacaggaaggggaatatcacactctggggactgtggtggggtcgggggaggggggagggatagcattgggagatatacctaatgctagatgacacattagtgggtgcagcgcaccagcatggcacatgtatacatatgtaactaacctgcacaatgtgcacatgtaccctaaaacttagagtataataaaaaaaataaaaaataaaaaacaactctcagaagcaaaaaaaaaaaaaaaaaaaaaaaaaaaaagcaatcttgcagatatctgacgagtctaagctgttcaaagatatgttgcatggagaaaatagaatagtagaaacctagacaaagactgggaaataaagatggtcttatccccaatactcttttaccttttttgtcttatgaaacattaacctttttctcataaatgaccagaagacctttatattataattcgtcaactcccctcatttgtgtctgctttaggctccaagtgagctcactcattctccatctggaaagaaaatatgggcatggcttccatttggacttgtacagacagtggcccataatgggaaccaggtgacacatcacaagggcaggttctgacacctcttccttccagaagcccaggggtgctggcagctgcttctgaggatctctctcttccttggctcatatttagcaaaatcaaatttaaagaaccccattcctcgctatccaccatccccctattcatgtgccagccactcctattggatcctgttgctttagctaatttttatgaaaataatagtcattcacctgttaggtacttatctaaggtttgtttcaaagcaagtttggtccccttgctgagggtctccagctttttcccagactctgcctctgaccctggattcaacattccctcaggaagcttcggaagagaggaaagcaaattagccacagaagctgtgggggtccgtggccttggttgctgctcctgctgtttttttgaccagcaggtggcatggatagctcccctcccgacatgtcactgcaggagaggagtttatatggatgctaagtggtctgtgcaccttgtcgtcgctaaaaaaggggcttcctccattagcgaattggacgacagatgtatcctacggtctcttgatttccttttttgctttcttgtcatagacctgacaagtttcttcagtgtgtgaaaaatcctgaggattcatcttgcacatctgagatctgagccagtcgctgtggttgttttagctccttgactccttgtggtttatgtcatcatacatgactcagcatacctgctggtgcagagctgaagattttggagggtcctccacaataaggtcaatgccagagacggaagcctttttccccaaagtcttaaaataacttatatcatcagcatacctttattgtgatctatcaatagtcaagaaaaattattgtataagattagaatgaaaattgtatgttaagttacttcactttaattctcatgtgatccttttatgttatttatatattggtaacatcctttctattgaaaaatcaccacaccaaacctctcttattagaacaggcaagtgaagaaaagtgaatgctcaagtttttcagaaagcattacatttccaaatgaatgaccttgttgcatgatgtatttttgtacccttcctacagatagtcaaactataaacttcatggtcatgggtcatgttggtgaaaattattctgtaggatataagctacccacgtacttggtgctttaccccaacccttccaacagtgctgtgaggttggtattatttcattttttagatgagaaaatgggagctcagagaggttatatatttaagttggtgcaaaagtaattgcaagttttgccaccgaaaggaatggcaaaaccacaattatttttgaaccaacctaataatttaccgtaagtcctacatttagtatcaagctagagactgaatttgaactcaactctgtccaactccaaaattcatgtgctttttccttctaggcctttcataccaaactaatagtagtttatattctcttccaacaaatgcatattggattaaattgactagaatggaatctggaatatagttcttctggatggctccaaaacacatgtttttcttcccccgtcttcctcctcctcttcatgctcagtgttttatatatgtagtatacagttaaaatatacttgttgctggtactggcagcttatattttctctcttttttcatggattaaccttgcttgagggctttaacaattgtattactttttcaaagaactaagctttagcttcattgatttttttctatttaattgggttttgctcttctctttagcattggaaacatagaaatgctttctgatttctttgggtagatttacgtattcagcttcttgagatggaagtttagatcactgatccttcagcttgttttcttttttgtatacatagattttaggacgatatattttcccttgagttctgctttagctgcagctcttatgttttgatatgcctctctttattatccttcagttaaaaatatctttcaattcattgttatataaaaatatgtgcctagtttttaacatctggagattttctagttttgaaaaaaacataagccaggcatggtggctcacacctgtatccccagcactttgggaggccgagacgggaggatcgcctgagctcaggagtttttacaccagcctgggaataacagtgagacattatctccaaaaaaattacctgggtatggtgttgtgcacctgtagtcccagctactctggagactgaggtgggaggattgtttgagcttgggaggttgaggctgcagggagctgtgatcacaccactgcactctggcctgagtgacagattgagaccctgtctcaataaaagcaaaaataaagaaaataaaccatatgtgttgaacaaaggattaataaattaatttgagactccttcagggaatgaccacaatttattgaaaatagcctaaatgttggagtcaggcatttctggattcatattttgacatcatgctgtcatcttgaacaaaatgcctaacctttctgaacttcaacttccttgccactcaaataaggattacaaaacttaaaatgtggtaagtactaaagacgacagcaaaaattgagtccagcacagagcttcctaaataagcaagcactcaacagagttggttcctttcttcctcccctgcttgacaatccagtttcccacaggagcctttgtagctgtagccaccatggtcagtccagggattcttcactagccccttctcccctggcagacatccttgtgggagtttagtcttggctcgacatgaggatgggggtttgggaccagttctgagtgagaatcagacttgccccaagttgccattagctccccctgcagaatgtcttcagaatcggggcccggtcagtctcctgggtgacctgctgttttcctcttaagatcctttccactttggttgctgctttcgggactcatcgagtccttgctcaacaggataccccttgaagtggctgcctgggccacatccccttccaaacaagaaatcaaaatattagaaatcaatttttgaaatttcccctaggaagactcatttgagtgttcaagttcagagccagtggagaccttaggggagggtggtcacaaggattttgcacagtgctttagagggtcccagggagccacagaggtggtgaggggctgggtgctcttttctccgtgcatgaccttgtgtgtctatcttcattaccacaatgcctcatctctacctcctttccccctgtagttccaacgtgggtatctttgccatctctggcccgaaggactttctgacctacatgtataaataccccctcacaatatatattacttttcctataagtgacttctctactggattactggttgctcatacacctcatattttactcgtaaatctactactccctgtctgcctactccattctcatttgctgtagaaaattctcttaccatcccaactttcacccaccatcatgcttacccaaaggctgtgggaatgacctgggccctaatgccccttttctaaattcctaaggctcaccattttcctattgtaatggttcttgaccttataatgtttgaggcaccttttcaaatatagtcctttgatttcagactgaatacttgaaaggacacacacacacatacgtaagtgcatatgactgcatacacccacacacacacacgtgcctgtatacagtcatatgatacatacacaaacacacgcacacaagcctgcatacatcatatgccaacagtggggatatgttctgagaaatgcatcattagatgattttgtcattgtgtgaacatcatagagtgtacttacactaacctagatggtctaacctactacacacccaggctacatggtatcacctattcctcctaggctacaagcctgtacagcgtgtgtctgtactaaatgctgtgggcaattttaacctgatggtaaatgtttgtgtatctaaacatatctaaacatagaaaaggtacagtaaacatgcagtattataatcttatgagaccgtcatcatatatgtggtccactgtttgggccatcattggctgaaaagcggttatgcgacacatgactgtatatatactttcctgttacaacaacagtgtctctcaatccacagtaattgcagcatccagtaggtcttactttagccctgagtcaccatttgtgtcaacgtgtttagtgccatgtccacgtctctcatgtaactggcagagctatcaaatattttggcaaaacacattgtttctttggctttgccttggtaactttctgtgccttttgtagctcttgtttggaagaagctcaacccatgtctgcacactgtgatacaagggggacagcatcgacatcgacttacttcttggtgccttattcctccttagaacaattcctaaatctgtaacttaagtttctcaggaagattccatactgcacagaaaactgcttttgtgggtttttaaaaggcaagttgttatatgtgctggatagtttttaagtatgacataaaaattgtataaagtaaaatattaaaatacacctagaatactgtataactttaagtcattttatcaacacattgctaatccagatattttcccgcagtttttctttgaataacagagcaattaatttacttttactatgaagagtcatcattttagtatgtattttaagcaatccaccaagaactcagtaggcagctgagaggtgctgcccagagaagtggtgattagcttggccttagctcacccacacaaagcacaacaggctttgaactattccctaacggggcatttattcttttttttttttttttttgtgagacggagtctcgctgtcgcccaggctagagtgcagtggcgcgatctcggctcactgcaggctccaccccctggggttcacgccattctcctgcctcagcctcccaagtagctgggactgcaggcgcccgccatctcgcccggctaattttttgtatttttagtagagacggggtttcaccgtgttagccaggatagggcatttattcttgaacttgattcagagaggcacacattaccattctctaatcagaatgcaagtagcgcaaggcagtggaaactatggaattcggaggcaggtgatgcattgggcgagtttattaacatctgtgactctctagtttgaaatttatttgtaacagacaaaaatgaattaaacaaacaataaaagtataataaagaactgtgctgaataattcttttaaaaggagttgtctctgggcttgaaagaactaagggacatgttcagtgggtggcacattgctgaagacaacaggacttcctacctactgcactacacgattgagtgagttaggtagctggggaaaggatgggtcactgtcctggtgtgtctcagtggtggaataagcgggaatagatgccaacaagagtccagtgctactgtctacaaagacctgaaaatccttactcacacctctttattcttcaacacattgaagaagaatgttgtttgcttttcagtaggagtctcacattcgagaatcacgtgatgacgcatcttttattctctattaaggagactcaccttgagacctcacaggatttaacataatgaaaacaacatgtgtgattatttttttaaaaaaaacttttaagttcaggcatacaggtgcaggcttgttacacaggtaaacttgtgtcatgggggtttgttgtacagattatttcatcacccaggtattaagcctagtacccattagttatttttcctgatcctccccctcctcacaccctccatgctccaataagccccaatgtttgttgtttctcactgtgtcccaagtgttctcatcatttaacgcccacatataagtgagaacatgaggtatttggttttctgttcctgcattagtttgttaaggataacagccttcagccctatccatgtccctgcaaaggacgatcttgtgtgtgattcttaataagtgacataaacatgaaacaacacttaaagacttgatgcaaaagacctggcagggtggctcgtgcctgtaatcccaacattttgggaggtcgagaacggaggattgcttgagcccaggagttcgagaccagcctgggcaacataatgagatctcatctctgaaaaaaactaaacaaaaattaaccaggcatggtggcatgttcctgtagtcccaactacttgagaggctgaggtgagaggattgcttgagcccaggagatcaaggctacagtgagctgagattgtgccactgcactccagcctggacaatagaaatttagttgctgtctcaaaacaaacaaacaaacaaaacaaaaaacaaaaaaacttgatgcaaaatgccagcctgcagaaaagagaaaaccaatgtttattgtacaaggtacttcacacattgtatcagcctgtgctctcagctgcaacaacagaacaccactctggctgtgtattagggttctctagagggacagagctaaagacagatagatatatgaaagggagtttattaaggtgtattgacttgcatgatcacaaggtgaagtcccacaataggccgtctgcaagctgaggagcaaggaaaccagtccgagtcccaaaatctcaaaagtagggaagccagcagtgcagccttcagtctgtggccaaaggcctgagagcccctgacaatccactggtgtaagtccatgagtccaaaagctgaagaacttggaatccgatgttcgggagcaggaagcatccatcatgggagaaagatggaagccagaagactcagccagtctagtcctcccacgttcttctgcctgcttttatcctagctgcactgatagctgattagatggtgctcacctagattgactgtgggtctgcctctccgagtccactgactcaaatgttaatctcccttggcaacaccctcacaaacacacccaggaacaatactttgcatccttcagtccaatcaagttgacactcaaccatcacaggctgaaagtgaattttctaaaaactatcaagagcttatagattgtctgggagggcgagaaaatagtttggaagccacttagccaagaacaacactccagattactctactggcttgtcaggtagaaaagttgccgcttgccctatggacacttggctgtcgctctatcactgccagaacacagacatggctatttctgggaacagaagtaatgaaagagaatggtggatggtgcatggcacctgctttccttcctcaccagccacagattcacggttgcacagatacattcagtgtgtagggcctgatacaggtaaaatgcttaggacagagctcagtttctctgtctgtaaaatgggagtgataagagtgtctatcattttgggttgttttgagcattaagtaaggtgatatgtgcaaaatttttaggataatgcttaatacatatgaagaactgtatcaatgttaggatttttatttttttatttttattttattttatttttgagactgtttttattccggaggaaattccttgacaagcctacctagtttagatgctgagaccctgagacctaggggacaatggagaagagggtagagaatggctctcttgccaaccaacaggatcagctatagtctctcacaagctttgaatcattctagatgattagaactttcccacctaagagagaaatgggccagatacctttcactaagagctggcccatcccaagctggaggttgacaaaaatgcagcaatagactccactgctcccaaatctaagaagttcaaatgtataaatttcatccttcaagctgatcaagagttcaacagcctcccttagcattgccagttcaagcccctgctctcctgaccaggtacttactgctctgatgatggttaaggcacgcagccttccttggtgcaacgaagccagaagacaagatgtgctgggagtagaaatcttctccctgtggaatcagtgagctgaaagaacattgagaaagcaggagagctaagaagaaatgggacagctatctctgaccttctgcacaagaacaaatctcccgttgtgaataatatttaataattggttcagttttcccagccttgccttccagggaattttcctgcactggtagaataatcagatacaagttggagggaaagatgccctgtgggagctgctgctaagtcccagattcttcttagacgctcagaatttgatgactttggcgctgggccacagaagtcatgagcttctccaggcacagcttgtttggcctggtgatgtgagaggaaggaagcaagctgggatctcatcaggtgtccttcctgctgtcagccttttagaacacgggtgactctgtgctatcagatgggattatttttaaaatgtgtttttttgtttttgtttttgttttgagacggagtctcactctgtagccaggctggagggcagtggcgtgatctcggctcactgcaacctccgcctcccaggttccagcgattctcctgcctcagcctcctgagtagctaggactacaggcacgcaccaccatgtccagctaatttttgtatttttagtagagacaaggtttcaccatgttggccaggatggtctccatctcctgaccttgtgatccgcccccctcggcctcccaaaatactgggattacaggcgtgagccactgcgcccggcctgttgttttctaagtgtcactcattaccatgaacatgtcaaatacttccacagtaaaagtaacaaaatagacatttctgtaataatttattacagaatcatgaaagaaccatggaacacaatgatggcacatcagtggctcatctcctttacttgacaagtgaagatactaagtccttctggggttgtggaaggtgtgtggagttgtgagcaatagtttaggagtcaaggttttctccttccatgtctttctttcctatcaaaaagcctaagaatccacaaacaggtgtggtggagattgctaactgttgcctagtatgtgttcttttcttctttttttaaaaaaaataaacagtatttccccatctgccatttttaatcagggcatgacttcacggctagagaacagatcccagctctgcagctggctctggccaatagggtatgaatggagatgattaatgcaattgcctagtcaccttagaaacagccacttgctctaaattttcattttttttaattatactttaagttctagggtacatgtgcgtaacgtgcaggtttgttacatatgtatacatgtgccatgttgatatgctgcacccattaactcgtcatttacattaggtatttctcctaatgctatccctccctccctccctcccccgaccccacgacaggccccattgtgtgatgttccccaccctgtgtccatgtgttctcattgttcgattcccacctataagtgagaacatgtggtttttggttttctgtccttgtgatagtttgctcagaatgatggtttccagcttcatccatgtccctacaaaggacatgaactcgtccttttttatggctgcacagtattccatggtgtatatgtgccacattttcttgatccagtctatcatcaatggactaaattttcacttttatctcctttactttgctgaaaaacaatgaaatttcagcagcagccttggacttagaaaatggaagccataagcagagggtaccaaactctagaaaaagatacttctctcttcctctcttcctctgatctagtttcacccagaatctcatttccatgatggctagacctggtctttttcttcattgctttatcctcaatcccagacacagagcagaaactcagtcagtatttgctctcagggcttttgtctccataatgccttctttaatcctcaccgctgtagctcagtttctttgtccagacttggctttgctggccactttagcctcactattaaataattgacctactgattatttgatcaccagtattagctgatccttttctaggtgcaaggtgctggtgacagagtattgacagaaacaggcatgggctactgccgtggagcagatggcccactccctgtgtattcaagggggaatctctacttcagcctgaacttggtaaaagtcatttcccccatacccctttccagctgcccactgtgttgtctggaaaactctggtcttttaggaggactgagaatgagatggttaggactgtcaatgacacaaacatgccccatgagcacaaagtacaatttggggtgatgtgagagggatgatgaaagcttccccaaacaggggagattgagagttttcctttaaaatgtttttatttttaaccaagttaccatttctttgatgtaagcaatacagataataaaaaataaagacaaaatcattgaaatatatcagtgctatactttctactcattgataatcttaccacccaggttaccagtggttaccactgataacatcttatgtatatattgtacacttttcatataaatcatatttttcatagaaaaacaatcctaaaattcatatggaacaaaaaaagagaactaaatagccaaagcaatcctgagcaaaaagaacaaagctggaggcatcacactacttcacttcaaaatatattacaaggcttatagtaaccaaaacaacatggtggtatggctcacgcctgtaatcccatcactttgggaggccgaggtaggtggatcatgaggtcaagatatcaagaccatccttgccaacatggtgaaaccccatctctactaaacatacaaaaattagctgggtgtggcagtgcaggcctgtagtcc

SEQ ID NO: 1426 - DNA, 1256 bp, Homo sapiens
ggtgcagtttcagaacccagccagcctctctcttgctgcctagcctcctgccggcctcatcttcgcccagccaaccccgcctggagccctatggccaactgcgagttcagcccggtgtccggggacaaaccctgctgccggctctctaggagagcccaactctgtcttggcgtcagtatcctggtcctgatcctcgtcgtggtgctcgcggtggtcgtcccgaggtggcgccagcagtggagcggtccgggcaccaccaagcgctttcccgagaccgtcctggcgcgatgcgtcaagtacactgaaattcatcctgagatgagacatgtagactgccaaagtgtatgggatgctttcaagggtgcatttatttcaaaacatccttgcaacattactgaagaagactatcagccactaatgaagttgggaactcagaccgtaccttgcaacaagattcttctttggagcagaataaaagatctggcccatcagttcacacaggtccagcgggacatgttcaccctggaggacacgctgctaggctaccttgctgatgacctcacatggtgtggtgaattcaacacttccaaaataaactatcaatcttgcccagactggagaaaggactgcagcaacaaccctgtttcagtattctggaaaacggtttcccgcaggtttgcagaagctgcctgtgatgtggtccatgtgatgctcaatggatcccgcagtaaaatctttgacaaaaacagcacttttgggagtgtggaagtccataatttgcaaccagagaaggttcagacactagaggcctgggtgatacatggtggaagagaagattccagagacttatgccaggatcccaccataaaagagctggaatcgattataagcaaaaggaatattcaattttcctgcaagaatatctacagacctgacaagtttcttcagtgtgtgaaaaatcctgaggattcatcttgcacatctgagatctgagccagtcgctgtggttgttttagctccttgactccttgtggtttatgtcatcatacatgactcagcatacctgctggtgcagagctgaagattttggagggtcctccacaataaggtcaatgccagagacggaagcctttttccccaaagtcttaaaataacttatatcatcagcatacctttattgtgatctatcaatagtcaagaaaaattattgtataagattagaatgaaaattgtatgttaagttacttcactttaat

SEQ ID NO: 1427 - protein, 300 aa, Homo sapiens
MANCEFSPVSGDKPCCRLSRRAQLCLGVSILVLILVVVLAVVVPRWRQQWSGPGTTKRFPETVLARCVKYTEIHPEMRHVDCQSVWDAFKGAFISKHPCNITEEDYQPLMKLGTQTVPCNKILLWSRIKDLAHQFTQVQRDMFTLEDTLLGYLADDLTWCGEFNTSKINYQSCPDWRKDCSNNPVSVFWKTVSRRFAEAACDVVHVMLNGSRSKIFDKNSTFGSVEVHNLQPEKVQTLEAWVIHGGREDSRDLCQDPTIKELESIISKRNIQFSCKNIYRPDKFLQCVKNPEDSSCTSEI

SEQ ID NO: 1428 - DNA, 66009 bp, Mus musculus
  misc_feature (1)...(66009): n = A,T,C or G
ttagttggtaaagtggttgtatggtaccgtgaattgacctttttgcttctaagtgacaaactcatgataatattaatatcaattttccatagagccatcatggggaagaattcgataagatattatctttgctaatgattctaggtgtgttttttttttttttacaatatctatgtatactgtagtgtcttcagacacaccagaagagggtgtcagatctcattacgggtgattgtgagccactatgtggttgctgggatttgaactcaggaccttcagaagagcagtcagtgcttctaactgctggaccatctctccagcccttattttggtctaaagtatttgtttgtctgttcattttagtcaggtctctatcttttttggctgacctggaactctctatgtagaccagtctggcctcaaacttacagagatctatctgtctttgcatccttggggctaggatttaagacacatgccaccatgctcagcccttaacattgtttttttttttttttttttattgttttgtgtggtttttgtttgtttgtttgtttatttttgtgagtgagggtggtgcatgcaagctactacaataatagtttctggaagttcgagggcaacttgttggttctgtccaagtcatagacttgattgatatagcaagcccctttgctggctgggctatctcgcagcagccactctagaaggaagtgtatgattactgccttccacccagctccagaatctggaattttgctcaagtgttccttccttgaggagccccactctggaaaagatgacaccataggtagtttttcttagcatcatggaccgagtgaagctcccacgacttcgggtggtttcatagccaaggctgcggcagagcctagcagagggagggctggaagttctcatcgctctctcatccagcactgagatctcaccaactttccttagcgtacggaggatgactccaaacagtttcaccttgaggtgtaacctcaggtttgctgagggctaacatcgaactggacggtctgctaggagcgaggcttaggcacgggtgggtagatgtgactaaattctctctggaagattggtttcaagcaacgggttgtgaacgcgttagggtgaatttagattctgacctggcctcttgtgccctctagtggtctaaaacctcagaacttgtcactcaaccaaggttgttcccgcccccccccccccccatggctaaatcgctataaccttttagccatctgttgcatagtgaattcagttcataactacgcttacaacacagtaaagcaattaactaaacacacacaataagagacctgacacatcttgtggggtctttgaaaggtcttcggtgtcttattttgtggtgtgcaaacccaataagctgtaagtccttagtggataattgaaacgatgctcgaatcagaggcagtccctctctcattgtcagtctgtgaaagattagctcgcgaagaagaacaacagcatgcaggcctgttatctggtgagatagtgccactccccgtgatgacggtaaagcctcagatttgagggagccaccggtttaaagtctcagttttgttcagattccaagatagcagccaacctggaggtgcgtgtgggggttatctcttgaacaatgtcagcttcttagaggagtgtgttcaatatcataacatcacagtcctttgggggcgctgcaatcctttttcaggacggagattacagcgctgtctccacactaccataaacaggcacacccatgtaacctacaagctatgaatgacttaagaacaagagcaaatgtagctctctctctctctctctctcacacacacacacacaaaagagagagagagagagagagagagagagagagagagagagagagagagagaatgtgtgtagagctcacgatgttggagctttgagcatgctgggtaaacaccctaccatcgagtttacccctacctcgaaagcagcacctagccccgggattgctcagagctctagctatcaccttcaaggaaaattttgtaactctggttgcccatggtggcttcaagcacctggtggcctcatagtgctgttcacacctgctgtttagttagggcctagtttgttttctgtctgtctccccagcccaaagctaagcctcggtatggcagctgtctgtccatgacagcatcattgagtctatcacagttctcacccaggaggtgttaaataagcatttgccaacttcaacagccccttggggtagatgctggaggaggcaggccaaaggcaagggtgatttccattcttatactaagtggcacagaaaggcaggtgcttgaagactcagaggcagccactcagaaggctgagctgtgcacccacagaaaggagcgagctctttgcatctctccagctcccactaccctttcaaagaaagtaaatgccttgaggttctagagcggctgttagaaaagactgcggctgtctggctgtctgtgaagacagagaaggatggttgtgcctgtaaagctgactgacggtgtgactctgaggctggcagagcccttattaagcgtgcagagactctgggttagaacccagcacctcataaacaacaagcaaactggaactgctttttgatcctgttacatgcctgtagactcacagctctacttaggagtctaaagaaggctgcttgagctaaggaaccaaagcagcagcagcaggagagagagagagagagagagagaaagagagagagagagagagagagagagagagagagagagagagagagagagagagagattatggacattatgttatctcttctgcttacttactttccaaagataaagatgcatcggcacaatggtgtgtgcctggtgatctctggccttaggaggtcactgaaatcagaagttggaggtcagtctggtgtactactaagcccctgtccaaggaaggaaaagaaaagaaaagaaaagaaaaggagaggagaggagaggagaggagaggagaggagaggagaggagaggagaggagaggagaggagaggagaggagaggagaggaaaggaaaggaaaggaaaggaaaggaaaggaaaggaaaggaaaggaaaggaaaggaaaggaaagggaaaagaaaagaagagaaaagagaagtcaaaccagcaaacaactcctcccacttaaacaaccacaagggaaccagaacagagaaaagaaagacagtgtggaccagcagagggccagcaagcatgatctcaaagctgtaaaactgcagaaagcttgactgagcacagggcagagcagcatcctgggccaggcctttttgtggggctgcagcgctctcatctccagttatttttgtttgttttttgagtgaatgagtgaggttgtatctggagttacagtgagtaaatgtcttagcggttaggatcaagtggtgctgcaacagaaaactccagaaggaggttttgttattgttgttgttttgtttttgtttttgtttttgtttttttgtttgtttttttgtttttttggttttttttgagacagggtttctctttatagccctagctgtcctggaactcactttgtagaccaggctggcctcgaactcagaaatctgcctgcctctgcctcccgagtgctgggattaaaggtgtgcgcagaaggagggtcttaagatgtttgtgtctgccacattttaggtctgggtgggcttggggctttaacagtcaagggtccttctaatttactgtaccatagaggtctgttcaaattctcaaggtggcctcagtccatggagatttggaaaccttgagtcacatttttgttttgttttgtttttcacaggcaggaaaaaaaaaaatctgagtaaagtgtaccatctactttaaaggacacccaatttcactctcaacacaccctattggctgtaactgttcttcaggaccagatctaactggaagagaccttgaaaagaagataggaggaaacacacaaacacctgaaccgccagaaactattactggggaagagaaaaaggaggttactagagaaaaatatgcaacctttgttcctggaaccaggcatctaactttctatcctagaaagatagataacctattctgtccctccagggggtgggtgtggcagtcagaaagctagaactcagtaattttaggatgaagatctcataaaaccctgctgtgggccagtgggtgatcaaatgatatgtttacatttttattttcagatttacccttaaatgtccatttaaaaataggtgtgaaggagaagcaatctcattttccagttatgtaatagctaacgtgttcctatttcatagaattgtcagttactaacagataagtccagctgggactttatctgaacctgggtaggaagtacagacttcagtcatattcaaatgatatctcattgtctggatcttgaatattcaggagataaagattcttggttcttcctgtatcttcttagaaatagaattccacctccccaggattgtccaaaattctaccttagattttcctgtaatgttattttgtctcctaagctttcttaaatatatcctgtgtaaatgtgacttcatctgggctgggggctagagaaggggtttagaggttaggagtagtggctgctcttccagagggcccaggttcaagtcccagcactcaccaggtgtattgtaaccatctgtaattccagttccgggggtgggggtggggatccgatgctttcttctggcctctgtctgcaccaggcatgcaggtagtgcatgcagcagataaaacttccatacacataaaaataaagaaaatctttttaaaaactgtcttcatcatgttccttctcaaatttgcttctggctgacccctccccagctgaataaaaaggtaccaggtgacctaagccagggtgacccctccctcaggtctcacacccagccagtgagtgcaatgcctgcgacttgctctctgaaggttctcactgccagaggtatttcctctttgctggcttgatatggtagcctccctcaccctcagctctgtttcagcagtccctcctccaccaatctgacatctatcaatttcccccatcaatctgtctatagaataagaccagtattcatttatggttttgttgttttgttttgttttgttttgtttttatcgaggcagggtttctctgtgtagccctgtctgtcctggaactcactctgtaaaccaggctggccttgaactcagaaatctgcctgcctctgcctcccaagtgctggtattaaaggcttgcgccaccactgcccggctcatttatgttttattcacccattatctatctatctatctatctatctatctatctatctatctatctatctatctacatatctattatctatctacctatcattatctctatcaagacagtctcctgtaacccaggctggcctcaaacttgctgtgaggtagaggtttgcctcaaacccatgatggtccttagtctacagagggctgttttgcagctgtgtccagcctagaaaccttctaagatctggggtctttgttcatttccagatggactcttgtgatctccagccattccatgcttcttcagctgaacccccttgagattcctccttgtgtggattgccattccttttaggagctcagagagcttgttcctttccacagggaagccctgcccaccatccttttggtattcagcggctgggtatgggtttatgagagtagcttcagcaggcctctactgttctcttaatcctgggaaggcagagttgaaaccttcccacttggcacagatctggaggtatcttctggcttagtaagactccattgtaaagtgtaggagttataggatatacatttgagtgtatttattttggattttttccccttcaatccaaagagccgttcgactggtttcttcgtttcacaggcgttgtctgcccaacgctcaaacaaacaaacaaacaaacaaacaacaggacacctcacaagaccctgctactctcctggggcttgttgaggacaaggctctctcttcagaggcggctgacctacgcagagccagccctcctccgaagccacagctgtgagctgggaagctggatggcggaggcccttaataaagagcagacctcccaatcgccttccctcccccacctctcacatggcgtttcaaattaaaagttaactaaaaaaacgaaggtcgaaggagatggagagtgtagtagggccccgggatcactagaaggaggaggaggctggtctctctgcagaagaagagggaatcggacgaccagatcccccgcggtccggtccagccacagctattcagagagcagaggaggatagggccctcctcgtctaggacgtaccacggagacaagctcttcaattagggccatcaccggctgttgtattaggaaccctagagagaatgcccggggctgtggactcaggcaactgctttccactaccccctggaaatcccggggggccctgtaagctagccaccgcccgctgaggaggtaggcgacaagtcgtggagagagggtaactggttatactagtcctctggattctgcagagcgcctttttctcttcttgcgagagtgggctacccctcagctctggctgcttcagagttggggtggagccctgctccatctctccgcagggactccaacatctggttgccgcatctccagcctgctccaggctcccccagccctgggaggaacctcctcccgacgcaatcaggagttaaaggggcagtcaaaggctttttcttttgctctagaccaaatgccccgttattttcaaacaagaaaccagacacacacacccgccccttgcatctcgacttgcccgcggcgtctttatttgaaagaaattaacaagtttgtttgaatgtgaattttcacaggtaacggctttggtggttgtaactggtcttcaacagaagggcttgaattctccaaggatagtagaactagtgggcagtgccagcgagcaatgagaaaggctaggcgttggtgccggacgttctgattctgggatgcaaggcagaatttattttctgtcagtgaccattttgatgtgattatcaaaagttcacggggaccttctcttgaaggttaaatcatctatagcagttagcgtctcttccttctcctgtactctattcctggtcgcccccaaggcatggggcataaggccagggtatgattccccaaagttcccaacctcgggcgagttgggcctcctccggtctcaactgctgggaaaacctcgttcttaactccagggaaaaagatccaaagggttgacaaccacaatctgaatgcaggctgggttcttgacacactaacccaagcagaaagcgattccgttaggctcaccaagtgacctggtccccccccccccccccccccgacatcagggacagaagttcagaaggggagaaaagaccttggctaggcactggcacttgccttcttcggccccgagaccacccaggacccggggtgttgagggggcaatctggaaggattttagaacagggcaagaactgggctggccccctccccctgacaccctgggttgagtgacgggcacagaccggacctttccttcagcccccagagagtggagggcggaaaatgcgattcaaacccgcctatgagcagtgggagcagtgggcgggggcaggacctggtttcagaaaccaaccgcttgagctcccaagcctcctgccctgaggtggctccagaccactgcgtttattttgcttttgcaggcaaggcagatgctttgctgggtcccgactcagcgagatctttgcccaaccatttgcttgcctgctccaccccctactggggcactatcccgggagtcagctctccaggcctttaaaccttagggaatgtcacacatggaaacctttagcaaatgtttgttaatgatcataacaaaggcatcatttaaattaggcaggtaattactaccagaagagcaactgggtgctcgatactcatccttttctcccctttaaactcccgaggaattactgtctcaggatacccgagccggcccgcttttcggactcctttaaaacggctctgaaatgaactgtgaagttaccatttgtgggaggagaacgcaggggccctgcttgaggcaggtagtgggattagagctggtagggtgttccttgcaaagcaggctctcctctgcagacgctcagccccaaactcaccccctccttgggtacctgctacaaaaacctaaatcttgacttgcttttaacaacagatgaaagcccccccaacccctcgctccgtgtgtgtgtgtgtgtgtgtgtgtgtgtgtgtgcaagcctgttcgcagaccttaccatcctgttcattatctacaaacattacggtatcctgctagcattccgaacaaggggctgttcatacatttcgccttcaacggtttcctgaaggaacatgtggaagtaatagtgagcagggcagtcacccgagctgaagatacaccagaggcgggcgtgcagaagggcggaggagaattggggctctcagcccagctccaggcatcctcttcccgagcctgatatccccacggtcggtcctgtcccatttagggacagcactcggcatttcggggaaacctctgtgatttacgccagagcctcaggtccactatagtggtgaaataaccgatggttattcgacgttttgttatcaacctggtcaccttgtccattttaattttgatgtgtgagatggnnnnnnnnnnnnnnnnnnnnaccccccccccccacacacacacaccaaaagcattcaaaaatagagcgcaagtcgaaggccctcccttcccccacccgctccgggaagtcccgcttcgcccaggtttggttcctggagtgtcagcgccccctttccctcgccagcaggatcgccgtgtcccaactgtctctcgctgggtgtcttgggttccctggtttgtggctcaaacgtcctgaaagctttcctagggtacgtcgcgtgcgacccactcggaagggtggaatttaggaggataaaaatccttctgccatcaagatgcagagggcaggcatttggtagtcacgcctagcctgagcgttttcatatgaagatagaagaagcgaggaccagataacccccgaaaacaaaggcaggaccagataagtggctccgaagggataaaggtcgttctttccttcttccggagaacatcccaaaggtacgccgagcaaccgttatttgcacaccgcctcacaatccagcctttcaaaaacccatcatcttcctattagactccacagtttcctaatcccattaaaggattagcaactacacggcactttcccttaagacccccagttcaaaacgacgcagccgcgttagaatttctccccagggccatatttctagcgaggcccagactgtctatagaaaggataatttgaattctagatttatattcgttttagaaatgagcagcaattttacgtgtattttcttttcgaagagaatacaaaacaatagcacccccacccccaaattgggaagtcaactcattttggaaatgatggctgtttgtagtttcctgaaacctctttcccggcagaacgtcaacacctcccccttcggccccccaccccaccccatctggtttgctcccccctcctcgttgttgttgaagtctgggggttgggactggcccccctgattgcataagagcaaaaagcaaagaagaggtcttgagcctgagagagtcagagagcaaggagtcctagggaaacttttattttgaagagaccaagggggggggggacttcatttcctgacagctatttactttaagcaaatgattagtttttggaggacggactataacattgaatcaattacaaaatgcgggttttgagcccattactgttggagcttgagggagagaaacaaacggaggagctgcggggaaggactggaagcttggggcttacttttcactccgggtatcggattttctttgcaaattgacatagaaggagaaggtaagggagaggaaaaagtgacttttgtttctcaagaaggtccctgatcataacttggggctgcaagaagctaagtaacttcaaattttgggcaacgaggaaaacaaaaacaaaacagctgagttcagtggtgtgtccagaaagtaacttattctgaataaacttcactggaatggggggtgtgggggggtaaccattagagagtcaaagataaaaaaaaaaaaagaaaaagaaaaagaaaatgaaaaaaaatccagacctatttttaaaagcaatgtttttttttttttccctacacaatcctatagccttccaaagaaattgttaggcttacatttttgaggttttcctccagggtgggggtggcgttcgtgcttactgggacgaacaccaagtaacattgggggggtggaagccgcggcgcttggcctcttggcagtgggtcacggaagaggacaggtttttaatgagtattttcattcgtcgcccgcggtttggcgggactacgctgtagcgggtggtgcggcgcgaagcttggggagggggcgcaccaggagaagtgtgtgtgtggaggggaaaggggcgccgagtggggcgcgggaaagcgctaagaaaaaagggaggtgtgaagggctcggctggaggaggtcggacctcggatgccggccgggcacactcggcgccagtcgagccctcgtaattactggacggcgctgctgttggaaacatctggggccagacttgagcgcggcggtggcggctgcagcaccgtgagaggggcgcgcgggcgaggggcgcagctccaagggttccggagagattggagcgaattacttgggtgctagaagcctcgggcggaatccgcagtgcgctgggatcgtgcgcctctcactccagcgacggaggcagcggcggcagcggcggcgcggacgagcgatctggaataatgacaaacacatttggcctcgagtgaagaagtcgtcctggcctcgcattccagcaactgggatttgaggaatttcaaactgcactccgaggggccctcattgtgctccgtagtccccacccccactcggctcacttgcgtctccagtggagtcttttctgcacggccgggggttgggggggcctggctcttgcttagtcctggccgcaggcagcaaagaggcaagatccctggctaggagctgacctcttgtgaagaagtcaggacatctctgaaaggacagacgtgggtgcaggtaagcagaaatgtaagaggccaaccaccctcgcctcctgcctacggaactctgggtgcttctctgccctgggatgatggatgcgaggcactggtcgcctgaacgcaacctttccagtgccccccccccccaactttcctcccaacgctcagtatcctgcaaaactcaggggcggtctccgcgcagccttccctccttcaccgttattcccttggaaatcagtttatacatgtgagattaacttccctcgagcagggccgggaaagcaggaagcgatctcttggctttgaagcttctgaggtcggcgattctttctgtttggaaggcgtgtggggcagtctgcagagtaaggcagtatgactcggccctggtctgcagcaggaccaagccagagcctcgcagccaggtgtgcaggagttgccagtgacttggcgaccagccttggcgagaaaggaagtgttggcctgtttgtctgctgtggggagtccttgcagaacccgcgcttagaaactcccaggtctgctaagacctctagaagacccggagggtgtgcatgggggaacccaagctggggagggggcgtgggtggcacttttaaaagtctgggctgcccagcgtcggacagagctgcccagaaaagccccaggctgggcggtgtgggaaacggctttttggcttcgtggcggaattgctcaatgttttggactgaattgcttctcctgaatggtttcggatcagtcttaggcagccttgaggagccggaggaggcctctagtgtaaacccacactgtggtctgcagctgtacagccccagatttaacacccaaagtctcagaagaggctcggggctcagggcgctcctcgggcgcacctcttctgccttcgcactggagtttacataacctctcttaggctcggattttcccctgaccaaggctttccatctcatccttcctctcgtcctctttctttgcaaattcctcttgatgaggactccttcgatttcccaacaggagtgtgtgtgtgtgtgtgtgtgtgtgtgtgtgtgtgtgtgtgtgtgtgacacaccaattaatttgtcgccgtggtcagttcctgcttaggaacccttgcaaaagtcctgttttgggttgtctctagtacagctgggtttctaaagctcgcgggagagaaagaaagaaagagaacacagtccaactccactgtttattgccccggatcccttcttttgctggagtctgcagacccgcagggttcagactcagaacctggcctcccaattctgggcccaggggcttctactttcttcctgggcgcgggctggggagagatgcagggggaggggcttcaggctgcaaacgcgtcaggcgccgaagctggcgggcgggatttctgcctcctggggacaggacctaggctgcgcgggacctggggacgtggtgaccatccttctgcctggtgacctcgaggggtgggatccccctcgggccttcagtgagtagcatccaggttaaaggttgctgactggaaagctggataggtgactcaaaggtgagaggctcagcgacagtctggccgctgatggttgggttggccggaggcatcagcattgaggaggagaaggagaagggggagaagannnnnnnnnnnnnnnnnnnnacacacacggagagagtgagggagaggcagagagacggagacacacagagacaggcagagagacaggcagacacagagagacacccagagagaaggggtggtcgggatcccgagcgtgctagcgcggaacctcagagagaatcggccccagtgcgcgcagcgctgtaggggacccggagcctgagctttgagcgacgccggagccagcgggtaagatcagcggggttgccgcgccctctagtggctcccgcagcgcgacccttgtcccagtagccctgggcggtcgagcggtccccagccgggagcccagtgcgcctggaatttgggctcacctgggtcgctcttgagttttcctgcgggcactgcgttggcgcagaggcgttgggtggacaagagtgggctgagggtccgggtttgagctggagaattggggcgtcttaatttagcagaaggtgggtggaggcggtggaattccggatccagggagatcttgggggacagtagccggcgtgtgcgctccaggccggctcaagcttccttggcctgttgctgtcttagaccccgcgttaccgagcaatggaaatagtcctttctaaccaactgggctgcagggaccccgcggggggcgggtttacgagcagcgagaacagagtggcagggaaaggcgtcgtggtctctcttggcagggtctaggtagccttcatgcttggagaggtggaaagtcaaagggtgttgtttcccctaaacccaagtgaccagttctgcaacatctttgagacctggtccacagcgctatcttcctggctctcaaggcacggctgtgtcttggtccctctttgggcagtggtgatgataattatgctgatggtgacgatggcggtatgtttgttcctcagtgaagtctctggaggtccccaaagaaatttagcattttagataggagttttgtcatttcttcttccacgcctaggagctcaactacaagtcatcacaagacctaaaagtaaagattaacctacgatttttttttaaagttgggacattttaaaatcagaactggtttcaatggcgcctgcagctcagagacaacaggacactggttcttgaaccaacactgccatctgctgtctactctgaggaactgcatatgcctctgagagggcttggcaaattccaagcaaatattggnnnnnnnnnnnnnnnnnnnnnnnnnnnnnnnnnnnnnnnnnnnnnnnnnnnnnnnnnnnnnnnnnnnnnnnnnnnnnnnnnnnnnnnnnnnnnnnnnnnnnnnnnnnnnnnnnnnnnnnnnnnnnnnnnnnnnnnnnnnnnnnnnnnnnnnnnnnnnnnnnnnnnnnnnnnnnnnnnnnnnnnnnnnnnnnnnnnnnnnnnnnnnnnnnnnnnnnnnnnnnnnnnnnnnnnnnnnnnnnnnnnnnnnnnnnnnnnnnnnnnnnnnnnnnnnnnnnnnnnnnnnnnnnnnnnnnnnnnnnnnnnnnnnnnnnnnnnnnnnnnnnnnnnnnnnnnnnnnnnnnnnnnnnnnnnnnnnnnnnnnnnnnnnnnnnnnnnnnnnnnnnnnnnnnnnnnnnnnnnnnnnnnnnnnnnnnnnnnnnnnnnnnnnnnnnnnnnnnnnnnnnnnnnnnnnnnnnnnnnnnnnnnnnnnnnnnnnnnnnnnnnnnnnnnnnnnnnnnnnnnnnnnnnnnnnnnnnnnnnnnnnnnnnnnnnnnnnnnnnnnnnnnnnnnnnnnnnnnnnnnnnnnnnnnnnnnnnnnnnnnnnnnnnnnnnnnnnnnnnnnnnnnnnnnnnnnnnnnnnnnnnnnnnnnnnnnnnnnnnnnnnnnnnnnnnnnnnnnnnnnnnnnnnnnnnnnnnnnnnnnnnnnnnnnnnnnnnnnnnnnnnnnnnnnnnnnnnnnnnnnnnnnnnnnnnnnnnnnnnnnnnnnnnnnnnnnnnnnnnnnnnnnnnnnnnnnnnnnnnnnnnnnnnnnnnnnnnnnnnnnnnnnnnnnnnnnnnnnnnnnnnnnnnnnnnnnnnnnnnnnnnnnnnnnnnnnnnnnnnnnnnnnnnnnnnnnnnnnnnnnnnnnnnnnnnnnnnnnnnnnnnnnnnnnnnnnnnnnnnnnnnnnnnnnnnnnnnnnnnnnnnnnnnnnnnnnnnnnnnnnnnnnnnnnnnnnnnnnnnnnnnnnnnnnnnnnnnnnnnnnnnnnnnnnnnnnnnnnnnnnnnnnnnnnnnnnnnnnnnnnnnnnnnnnnnnnnnnnnnnnnnnnnnnnnnnnnnnnnnnnnnnnnnnnnnnnnnnnnnnnnnnnnnnnnnnnntccccctcccccctctccctccttcctccttcccctctccctctcaaattttaaatttttatttcaagtgtatgtgggggggttcccccatatttatatatatgagtcttgtgcatgcctggtgtcttctaagatcaaaagagagtgtcaggttcctgagtctgagctgctgtgccggtatagagacttgaacccagagaccattcggtgaccttaaccactgtgctatcccttcatccccctttttgctcttgaggagcacaaagatgattttattaatttttctttcttgcgagtctgcaacaatctccagaggaacagattttatttttcagacatttgtgtagtttccaacgtgtgtgtgtgtgtgtgtgtgtgtgtgtgtgtgtgtgtgtgtgtggtcaagagatcaaattcaatccttccaaatgctcagtaagcccagtgtggctgagctacatcgagccctaattgctactctttcacacgtacataatgaacggggtttatgtgagcaggcctgaaaggaagggagcaggcttttttccttctgtaaacacagcgtgtgggcttggtgacttcaagacacctgatgacttttcttttcatttagtgacagtcgaaaggatgtgttattttattctttcagagttacacatctggtgcaaagagaccagaaaggtctatgaacccaggctgccccctaaaatgcatgtgtgtaaaagtgtcccagcccctgtctcttattgaacatttaatcttgtactttggcagatcaaaacaccgcagaccctggtggggtacaggtcctgggaaatacaatttgggctagaaaacgcagaagtggccaccattgcagacccatatttaagctgcctgggctgaagttctgagagcgaataaagagagaggagaaacaaaacaagaacctagatgtgctattttcatagttagaattaacttaggagaactgaaattaaccaaacctcagaaatctgaatcttgaaggacctcggtggctttggtggctgagagcctcctgtggtctttaattgggacagggtggggtggatttcattgtccagtggttgagcagcgaaatccatgttttttgctcttactgtcagggaagctgggagtaagcctcaggggagtggtagctcttctgggagcaagcttgcatcctgtttactttcaaatttgcctgtggtctctggtaggaggctcaccttaggagttttcacttctgcagtggaatgactagctctgatggtgtaccgctctgcagcaggagagcttgagttcaaggccaacctgggctacatcgtgtatatggaagaactagaaagagggggaaggaagaagggagggatgggaagggggtggttggagacagtggccgcagtcagattgacttctgtgttttaggactgtaggtgttagttaacgttgcagaatggtcacagcgataccagctcgatagagacttttcatcctctttcccactaggcagaaggaagagatgtggagtatccagggctccacttaattagtcaggaggagttcctagactggttaagagcactgactgcagccgagcttggtgacacacatctttaatcccagcacttgggaggcagaggcaggcagatttctgagtttgaggccagcctggtctacaaagtgagttccaggacagccagggctatacagagaaaccctgtctcgaaaaacaaaaaaaaaccaacaaaacaaaacaaaacaaaacaaaacaaaataaaacaaaacagagtactgactgctcttccagaagtctggcatcttaggattctgcagggcaagtctaagtgaacatcaggcactttgaaactgtgtatgctagtcccttaggactcagggaggcgagccggcaagccagtgatggttggtttcaagttagagacaggacctaagtttaaagggatagacagggtttcagagctggaatcagaatctaatctgagaaggaatgagagcaacaggttggagatgtcccatagcaccggagagtgagtggggcagcaatctcacaatctggcttgtctctcccactgtgacatggtttttgaaatgtgaacatggcagggcaggagactgatgtccaacatggaatcagtgtgggagcaagaaacaatatcttgtctatttatttatttgtgataaagtctctggggctggagagatggctcagcgattaagagcactgactgctcttccagaggtcctgagttcaattcccagcaaccacatggtggctcacaaccatctgtaatgggatctggtgccctcttctggtgtgtctgaagagagacagtatactcacacacacaaaataaataaatctttttttaaaaagtctcttagagcccccgccaggctagccttttgtctctacttcactatgcctgactaataagtgatttaatttaagaatacattcatgtatttattacctgtatgtgtgcatgtatgtatatgtgtggaggccagaggaccacatatgggagttagttttctcttcccaccatttgggtcttggggctctaactcaggtcatcgggcttgggagcaagcacctctacccaccagactgtctcaccagccccattaattttttattttaagtgaaatctgtccctcctccttgcaaagtgtttagtccccatcacaccaacttacagtgctacaagcctcagattttgtaatggcagctccctctgtctgtacgtctgacctgtggatattcatggctctgtctgtgtgtctgaggtgtggatgttccgagctgtgagcaactaactaaagcatggtccttgcaggttgggaaagcaccagccaaaccaagactcccttccggagctcttccatagagcaagcactgggagtctcttcctctccccttgggctctctttctcactgtgggacaggcatgctactgttattcatggccagattgtctgggtctccgatgagtaatggcatgcacctagccaggcaactgctgctatcagagtctggagttgggaatcttaagcaaacacatgtggacattcgcatcgttatcactctctcggaggctctgttttcgttgcccactttgagcgccagtaaatcatcacccctggcagtaagtgtaccatatctggacacacagaaggaaatttgctggagcctggctggggcaggccgttcttcagagcctgctcagtccctgtgctgagttctttctctccagcttagtggggcttgaaagatccatagctgctgaccctggctggggaggtaccagggtggggatgtgataaatccccagccagcacgctggctctgggagccgctttgtagctggccaagtggattatcggtgggaggttgatgttggtgtgtacaaacacacaggccctcactgctaattgtggtaaatcaggcaaccagcctggctctggggcctcccgtggctgtcaccacagccgtttggaagccctacatcctccagcacctgccaacatcctcagaggccattaagccagacagcatctttctaagtgcatttggtccacaaccctgcaattaggttttttaattgtggtgttcagagaaggagaggggtcaggggtaggttgtattgggaaagagtgggcacagaaaggctaacctttcccagatccctagggattgctaggctgcttgtcggtgagctccaggctcagacagagaccttgctttaaaaaaaatagtgtagaatgatgaggaaaacacctgatgtcaattacgccttccacatacacctgcgcacacatgcatacatgcatgtacacacagacagacagacagacagacagacagacacacacacacacacacacacacacacactcctggatctgcccatggctaagtgtttttggatcatttgctaaacttctgtaccccacagtaagaaactgtaaaggtggaggctcttcctgtatagagatttctaaaaaggaacctttctattccccagaatttggtctgcacagatcctgacaatgatgttttctgtgcctcccaatggatgaaatctaagtgtacatccaccatgctgggcctctcctcctttctctcaattgtccctttgtttgtgttcctgtcctgggctttccaagcttctagtagcctggccatatgtccaggtcccacaagaacacaggctggaagccaatgctcttgcaggcttccgtctcacagaggctgcctcaaagctagggctacctcgaaaccacacgctatggtcaaattgttccagccttttctgaaaggaagacgattcacactgccgatgagctgtgatgtgaagcaagggacagcccacgagaagcagagacttctccagcttagatggagaaccagtagtaacatttattcccccaatcccctttggagacagtaattgaggatcctggcttgactctcaggctccgccatgctctttgatgcttccctcttatctatctgactgtattagttgtcagccttaagctgggacatgcttccactgacggtaccagtaagaactcccatggcaggagaacctggcccaccagtggctttctgtttggctaatgctgtttatgtttggcttttgtcatttgcaggtctcaggagctatggggacctcccaccaggtctttctggtcctcagctgtctcctcacaggtatgtatccacacatgcgtccttgttctcctaactcacagttccagggagccaacgtccatgttctgtgggcctctcacctgcacctgggtccaaaggggggcgagatgaaaccaacaggaacttttgatgcctttcactaaatggcaccaattccatttcaaaacaagagctttctgtcagtggtccgaagggaggaataatctggatattgacatgtctgcacttgcccacttcttcctctctctgggatgggcttacagcaaggaaggagaagatggttttgagcatgttcaaatagagtaaagactcaggcatccttcatcaggtttagggactcaaacctgtaatcccagccacttgggaggctgtagcaggaagatcataaactcgcggtgtgccagggctacatagtgagaccctgtctttaaaaacaaaaagtaaaaagagggctggggagatgctcagtggtagagcgctggcctggcacttggtagatcctttccacgtgtttgtctgttgcagacattactccaaagttaggcaccgatggaaactagagaccattaattaataattaagtcagaacgtgtctcctcttcagacaagggaagctcggctgaaacgtgaagcttagggattagtttcaagcccccactccccgcctgtgttttatttattatttgtgaatttaaacccatgccttcctgctttggcttttggaaatcattaaggagagatggtgtgccagagggtggcagtgaggaaagacgtggggctcctgagtgagcccagatctgctgtgtgctttgttcgggcctctctccctgcctcttctcacatctcctgcccattttttttttaaaccaagggaaacttctgcagggcatatgcatgataaagaacccatatgtgcttgagcccagaccgcactgggatattttatggtcacacataagagtgtgaaatatggaattggaatcagacatcctttatccgtttgagtgtttggaggggtgagtatggggcgtttggtggggctgttgaggccgttggaacacttgctgccctcagcagatgcagtggctgttataatggggggcctttcatgggcatccagaggaacagagtttcacgtagaaatggccgttgttcatataagccgccactgtggctactctcagcgctctggagaagctgtcctttctggctcgccctattcaatggctgtccctttctacagggccgggcctcatctcctgccagctcttattaccctctatcctcccaaacgagaatgagaagattgtgcagctgaattcgtccttttctctgagatgcgttggggagagtgaagtgagctggcagcaccccatgtctgaagaagacgaccccaacgtggaaatcagaagtgaggagaacaacagtggcctctttgtcacagtgctggaagtggttaacgcctccgcagcccacaccggatggtacacttgctactacaaccacactcagacggatgagagtgagatcgaaggcaggcacatttacatctatgtaccaggtgagttgcagggccctcctagaccacgctgcgtcctgccctgcctgcctctgagtcaccgagttaaggggcataaaacacgagggattcataaatgtttattgcagagaaatttgcaaggtagaaaagtctttcccttctttcatctctgtctgtctgtctctgtctgtctctgactgtctctgtctgtctctgactgtctctaactgtctgtctctgttgctgtctgtctgtctgtctgtctgtctgtctgtctgtctgtctctcactggaactctcactgaggctggatctaggtggttagcctgccaacccaagctatcctcctgcttccaccttccacagagctaaggatatagatttttttctttttatgtgagtctttgtgattagaaccctggtactcatgcttttaaaacaagtgctcttactcactgggccactccttagctctctgtctgcctgtcagtctttggttcttgagactctcactgtcttagaacttgccattgtagtccaggctggcttctaacttatagcaatcctatggcttcagccttctgggtgctaggattaagggcatggggatgcttaacttgctggttttgtgtttgagataaggtctccttctgtagaccagactggctctgaatttaccattctctgacctcacctcccaagtcacagaattgtgtgcatgtggtacccgactccggtgttttgttttgtttgttgttgttgcttttgagatgagagcttggtatgttgcccaggctaccctcaaactgctacacttaactagtcctgctgtctcagcctcttaaatagcagagactacccacattatgaccagcaaaatacacaaattaaatacagatcatttgcacgttcaaaatcaagaaaaactcatgggaggcttggagatatggttcaggttttgggagcattcgcagctcttgcagaggacccaggtttggttcctaggactcacagagatacatccctctgttagacagttacaggagattagcgccctcttctgtcctccacctgaactgcatacatgtaatgtacctacatacatattcagccagaacacacacacacacacacacacacacacacacacacaccaaaaaccaaataaacaaacatggaaattcccctaaatgttaacgaccaaggcaaaaagaattccttccactcttcaagagttaatgcacctttgtaggaaagctggaatggtggtatttaaaatgcatgttgttttaaaagagaaagacttgcagcttgggatctaactcagtgacagagcgctttcccagcaagaggaaggctgtcgattctacccagagaagtggttattgtcaacatgtcagggctttattaattttgaaaagtctttactgtcgaatgtcttttattcagatggtacaaaacaaaaaaagaaatcaaatgtagtcagtcagtgtggttcagtcagtgtgagcaggcacttacatgtgtatcaggtgccatgtcttgtgtgggaggcaggattaacaggcggcaggccttgctttggatactcacagttcactagggtagattccaaatagccactcagtttcagctttcatacaaatgtgcatttactcttgacgagtaggaaggaattctctttgcctttgtcattaacatttagaggagtttccgtggtaatgatatgaccttgtgtctgctgagaggcagatgccaagatgtaggttacatgccttggttttataaggggcaagacctaggaaaggggtgggagggtccccgcatgctcctgctggactccattagatgaatcggtactacactgccttcttgcccatgggcctcaggtgccctcagtcagtgacaggaagcattgctggtgagtgtgattttaggttcagagggctgcagagctaggctctagaccattaagccctctgtggttggagggatgcgctttctctggaatccaggcttagctgaaagctttcgatgcatttggtctgccacccacctcgcctccgctctgagcttttgccgagctggagctgttggtatctgtatgtagcgttggtgagcagctgtacaaagaaggaccctggtgttacctacacaccatacaggtagcattcggtagtcgagaagattagtcttggagagggaagcccaactgaagcatgggaacatgagtctatctgtctgaacctgacccggatgcatacctgtctaaactctgtgtggacagggttcaagtgttcggaactctgaacacaaattagaacggtggggctttatgttgctggggaatggaaaaagctttggagtacaggtgactgccgttcacactctgcctttactgcatgtacacgggtgctgggggtttgaactctggtcctcacacttgcctggcaagcattttcctcctctccagctccgaagtgtctcttttcttacaatagaacagtttgttgtgaaaagggcaggtgtttagaatgtcactttaatgctacacagtaacaatggtggtgaagctaacgatgataatgatactaacagaacactttttcccccctgtatatgtgtataaaaatgaaatgaaactctaatagattcttctctctctctttaaaatcacagacccagacatggcctttgtgcctctcgggatgaccgattccttagtcatcgtggaagaggatgactctgccatcataccttgccgcaccacagatccggagactcaagtaaccttgcacaataacgggaggctggtgcctgcctcctatgacagcaggcagggcttcaacggaaccttcagcgtggggccttacatctgtgaggccaccgtcaaagggaggacgttcaagaccagcgagtttaatgtttatgccttgaaaggtactttcacctctctaagtgagagcaacaggcaaacaagttttttttttaatttgggtgttgcctcttccttctctatacaacgtggctgacctctgtaactataataatacaggcttaaaaaaatactacaggctgaacttgcttctacgtgtaagacagcatgttccctgaaaaatacctcaaggaattctttcttgcataagcctcttactatttggttcctattcttgaatatgcagccctaagaagcaaacacaccccagggggttggaggtctagattaatttcagtaacttaagaatcaagtgatttcagttttgaaggaagactatagttaaagaggctaaaacttcttccctttgatgtgaggggttcgttagcctgacttgcaaagtctcggggaggggggtcctggtggccgaattttaggtggggactttacacggacatggagcagaagcaagaaattgtcacttgcctcttgttacaaacttattttgttctgagctctgggaggtgctacgaataactgggggagggctggagagatggctcagtgtttaagagcactgactgctcttccaaaggtcctgaattcaattcccagaaaccacatggtggctcacaaccatctgtaatgggatttgatgccctctcctggtgtgtctgaagacagcgacagtaacagtgtacttacatacataaaatagataaatcttaaaaaaaattaaaaagaataactgagaggcacagaaaagaagttacagccaggggcacggagactttcagtggcttgaaagagtgcagccacagtcatacagcccaggcatgtggtgttcaggttaaaagagactgagctttaccatcgttgttattttgtatttctgttatatcctaagttgtgtaagactcaaagtccaggctccgtagacggtccggcttttgcctccattacactggtttggacatgattttttcatcatttttaacggccctgattcagctacaggttttactttgagatcccgactgtactgtattttctttgtcatctcatcacagcaacgtcagaactgaatctggagatggacgcacgccagactgtgtataaggcaggagaaacgatcgtggtgacctgtgccgtctttaacaacgaggtcgttgacctgcagtggacttaccctggagaagtggtgggtaccccgggataaggagctcacggaacccccacaacaggacttgtaactctacacaccagaggtgtttctcttggatgggcacatccctgagcttctctgggcctcagcttcccatctgggcaatgggcacatttgactccaggacttttaatttttctcaatcaggcagagtttggcatgaccacaagggacatgctccccttgagaaggcagagacaagcaggaaggttctgtggctagaacacaagcattaaagcattagaaaggcaagaaatgcctggattgtaaatattagccgattgcacagtcatgtatcctcactgtcttgggtcacacgccttggggttgtgaggtgtctgatagtgttgctaagtgtgtgtgttattgtggcctgtagtcacccagctgcacaacagcacaccagacttattccttccatctgactggaactttatataaagccttattcactctgatagctgtagagagtatataggagctgtgtatgaagaatatgtaaatcgaatgcagaaatggtgtttaatactgtgcatgggggcctcatagggaacaaaacacatgtatacaattatgtatggggaacaaatccatgtgtcaattatatatatatatatatgtatatatatatcatgtatgtatttttctccttactattacaaaataacatatagcacacattacatatatttgtgtgtgtgtgtgtgtgtgtgtgtgtgtgtgcactttacttgcatgtgtgcctgaatgacagaacagggtatcagatcccattacagatggttgtgagccactatgtggttgatggggaattgaactcaggacctctggaagagcagccagtgctcttacctactgagactctgtactctggtcgctttgtcattggagaactttgcttctgcttgccatttctctcccacacttttgctggcttttttttttttttgctgcctggccgttcattcacacttttatttgataatggtggatgtgtgggacagcacctttgtcacaacatgctatggaggtcagaagagtactcttctggactcagctctctgcttccacctttaaatgggttccaggggttgaactcaggtctctaagtttgcatggcaggtgcccttgcccactgagccagcttgcagaagcaagtctggtgctctttcattaggcatgatcgttaggtgttgtcaattgactgcatgcatggtgggacactcacagtctagtgtattatattccttgcactatagtgtgacttggtggttttcttcatgctccattacttttaatccctaaaacacaatacttcatttatgaagtgtttttaatttttaatttttaagccgaaacatatgacatttgacccacaattacataaaatgctttaacactttttttccctcccataaaagtgctgaaaacttctctttgaaaatttgtaaactatggagaaacacagggaaaccttcttctcagagcagcacacatctcagattccagacagacaggcagaccctttagaattcttcattaaaagattgttttgcaatactgatggctgactcagagccttgcaggtgctgagcacgggatccatggctaagctactgccttagcccagcgctttaatttctgcttgccttttggtttatcggggctcactctgtagcccaggctggcctagaactcgctacatagctcaagctggcttcatccccaggggagtagtccctcatcagcctcccgtgtgctgggatttgagctgtgagccaccacacttaacgctagtatcgttttaaagcatggctttttaaaaggatctagatttagcgttattttcacttcttgttactgcatgtgaagcaaatataataatggattcattatggcatttacacacacacacacaccacacacacacacacacacacacacacacacacttgattatgttcatctgccactaactctgctctcttgcccccgcccccacccgtgttggcagagtcccttcttttaggctagtccccttctttccttcatgcctttttacgatttgtttgtggtccaattagcttaattaaagtgacttccaggaggatgggcaaagggttggcgggagcatgggtcacttaccagggtctacattactggagagaatgtctcccctagcaactgctggctactgacaaggcctccgagaggacaggggcctcgctggcttctcccccttctgccttcttatttatatttctattctttaggaggttttatgctttagcgcatctttaggctcacagcaaatgtacaaagcacaccaatttcctacgtgatcccggctcccacctatgcttagcctgccaagtgccaggtcttcctcggagcgcaccgtgcttaggacccgatgagcctcctacactcacaaaccctacaccagggctcactctggaaggacctttttttcacacgaccgttttcttgtgtgccactgcagagaaacaaaggtatcaccatgctggaggagatcaaactcccatccatcaaactggtgtacactttgaccgtccccaaggccacggtgaaggacagtggagagtatgaatgtgctgcccgtcaggccactaaagaggtcaaggaaatgaagagagtcaccatttctgtccacggtacccactgttctgttaaatggctgccgttcgagggacttggttgggaggcacaggctgtggttattatttactgggaactcttgctttcacagagaaaggcttcgtcgagattgagcccacctttggccagctggaagctgtcaacttgcacgaagtcagagagttcgtggtggaggtgcaggcctacccgacgcccaggatatcgtggctgaaggacaacttgactctgatagagaatctcaccgagatcaccactgatgtacagaagagtcaggaaacaaggtaaagggggccattcccaagtcactcccgtaacaccagccttctgagcgctgagggagtggcagtaccagagggaccagcacctgagctgagacgtgcttacggtcacattttaatcacagcttcctcacactttaagataacattgcagcctgacgaggtaatacatccatgagtgtttaacgtaaaatgagaagaaaggactaaaaggttctgtcctccagtggaggacagcatactgtttcaagctaaaggtgaaggtaagatgggatgggatgcgcttggaccttgatggtcattatacttcagcagacattatgaactgattccatgtgtgaggtaattcgaatgtaagtctacatgtcaccaaataccattgtttagagtgcgtctgccccaatccaagattccactgagataagactagggtctcgttagatctgactgcagtgatggtgttggtggctctcatctctaaccactgctgctgctttcctgccccctggtaccgttagtcaaccatgggtctcttgtgtcccttgcatactcagcagacactctgccattgggcaccacaatttcccttgaagtttttgagctatgaatagaaattgcgagtcagaagttgctttattttcttattttttatttttttatttttttgagatagggtctccttctgtagccaggctgaccttaaactctcaacaatccccctacctcatagcctctaggattatggctctgagccactgtaccaattaaagtcattattgacatgtttcttgagacagggtttctctgtagccctggctgtcctggaactcactttgtagaccaggctggtctcaaactcagaaatccacctgcctctccctcccaagtgctgggattaaaggcgtgcaccaccatgcctggctattgccatgtttcttgtttcattagtatcactattattgttgttgttattattgatatatcgttttctgggacaggatcttgctatgtagtcatgcctggccttagacttgtaccgctcctcacgcctcagcttgcgagtgctgggagacacagcgtcttcctggcacagctgacatttcacgggtgtctgagcaggagtacaggctgtaataagtagtgctggcaaggcatgcttttcaggggagtggtgtgggaaagctggtcattactgagtttcgagaacccttcagaccttggtctttccgttcgtgggtggatcaggcagcacaaggtgaaaggagaagtcgctttcatggagttaaaaccagtgaacctgaagactttctcggctaaacagatgtaggctatgaatggcctggatcgtttggccaccaacagccagaaacctggtcgtgaagccaatccaatagcaggcagagacaggcaagccagtgtagcctgcttttctacaggtcctgtgcttgtagggaatattgaagcccatgaaatgctttcccacatttaatatcatttgataaatctcagaaagagtgctctgtgtgtgcagttatcgtattttatatgcatggaagcggaggtgtggggatccaataatttctacaattttgttccatccaaaatacttttgtgtattgggatgttttataatgaaatgaaaagtcaaatgtgaaaatattgtatttatacataaacacacacatacatacagcacatgcaggcgcacatacatgtttgtcagaggataatgtgggggagtgagttgttgcattatagcttgttgaagcagggtttccattggcactgctgctgtgctgaacatttcaggctagctgtcccgagagctacgatgcattctcttgcatttcctctcatctcacgacaggagcgctggggttggagatggagatggagatgggtaccactgcatctgacttttttttttttttgcgggttctgggggttgaattcagcccaccagaaagcaccaagttaagtggtctcatttaaaaagtcttttcttattttcattcagaaatgaggtcttgcagggcaatggtaacacacaactttaatcccagcacttggggaggcagaggcaggaggagctctgtcagtttgtggccagcctgttctacagagggaggtccaaaatagccagagatacagtgaatccctgtctttacaaacaaaacaaaacaaacaaaacaccaaaaacaaaacaaaaatcaaacccagaaatgaggtcttgccagaattgttagctacttggttttctattgaggctatgagtgacaccttcaatgtgtggaaactagatcaaattttagaaaagacattgatattgacaagaaagattttttttaagaaataaaatttcaatcataaaatgaagctgcttaaataatcggtggttatttagtctctacttatggaaataaacttcttgtctcttaaggtatcagagcaaattaaagctgatccgggctaaggaagaagacagtggccattacaccattatagttcaaaatgaggatgacgtgaagagttacacgtttgagctgtcaaccctaggtatgtaaaggtcgtgctcgctcacgggtgactgtcccccagaggcacctcggctcttctcttcaaagccttggaggagaagccagaccttggggtagaggctgggtctgacgcatgtcaggaccgtgttgtcgtgcctgaaaattcaggtccatttggaacagtcctcatccaaaaactctgaaatggccccaaatcggaaactttgatttttatcaggggaggtgttgagatagtttatgtatgtagcccaggctagcaatgctcttgtctcagctgtagcccaggctagcaatgcccctgcctcagcctcccaagtgctgagattctagacacttgtcaccacatctagttcaaaatctgaaacattttgaatgctcacacgatgttacaagtggaacatcctgacctgacatcttgtgacaggtcagaaaatattcaggcatataaaaatattgtgtaaaattaccgcttggttatgtgtatgaggtgtatgtgagatataaatgaattgcatacttaggctgagtcctttcctaagacacctatctcattaggatctaacttctgaaatctaaaacacttctggagaaaaatatgtgctgaggaaaaattttaaagtaaagtatgtattataaagtttaaattcttattttagtttttaaaatatttaatatttatttagttttgtgtagtttaaattatttactttaaatcaaagtatataaaggtaaactaaaacttgcatatttttcagcttattctttatttttattactattattattatcatcgtcatttggtacttgaatcccatgctttaaaaacaaatcaaggagctagagagagagctcaatggttaagagcacttgctgctcttgcagaggactggggtttggattctgacatccacatggtggtttacaaccatctttaactccagttgcaggggatctgataccctcttctggcctccgcaaacaccagacacgaatgtggtgcctattcatatacgcaagcaaaacacttgcctgcctctaacttatttgactacaaattggtgaaaagatctttaaagtctaatgatggcccccagacgcttgagtgaaggctgctttcatcagatccattagtcaaatcccgaatgcaaagatagctggaggatctcccttgccttccgaatggaaggaccccagcccaggcactcctcacctccctccgtccagatctgagtcatccaggcacaaagcccccaaacacgggcactgagggagctattaactgagtgggtctgtccaggctggagttgttctgttctgtcttccacaaccggtcccttgaggaccgttcctgaaccgacgggacccttccgcggagggatgtccctccacagccagagacaagagctgctctgccctgacttctcctttcctttcccagttcctgcatccattttggatctcgtagatgaccaccatggctctggcgggggacagactgtgaggtgtacagccgaaggcacccctcttccagaaatcgactggatgatctgcaagcatattaagaagtatggaaaccagatgttccctgttcttgtgtggtcgggatgtttcttccatgacataaagggcctcaagtgcagtttatttctttggttgacctctttttgtattcgcgattcttcctcggcccaaggctcatattactcacaaactatacaataggtttctgaaagtggattccatctcttgatgtgtgtgtgcgcgcacgcatgtgtgcatgtcctcaaagggcctttatttttatattttattctccattgtttttcttaaacatttcccattctctcttagaatgctctataatgtgaagacaaaaagaattgtaagaaccactcttgttcatggattttatctgtatatgtatgtatgtatgtatgtatgtatgtatgtatttagcttgcagtcctgttgtgacataatgtctcactcaccgtgtagccagtgctttggctgaagtcaaacgtaccattctcttgctttgctctcccaggcgctggggttgcaggagtgcaccaccagccctgcccagctcacatttctttctttctttctttttttttaaagatttatttatttatttatttatttatttatttacttatttattatatgtaagtacactgtagctgtcttcagacactccacaagagaacatcagatttcattacggatggttgtgagccaccatgtggttgctgggatttgaactcaggaccttcagaagagcagtcttaaccactgagctgtctcaccagctcccagctcacatttcttatttcttaccataaatgttgtctcggtggctagactggcagtgcaaacagagccgagagccgtgcccacgtgactcctcatacccacttgttctttggaagccaggagagggcactggatcccctgaaggtggagtaacaggtggttgtgagcattttagtaggaatgctgggaaccaaatgtgggccctccataagaacagtatgagcgcttcatggccggcccacctctctagcccctcctccaccttcataggcaggcccatgaactgtgcgcccacaccttgctccacggcaactacctgctttcagaaggccttgagtgcgtctctgctgaaagtgcagcttgctattgctctcctcactgagagctgtggagtgacctgggtcctgggatttctaggtgtaatgatttaacccagaagactactgcagccttagggaccccttagaagctcttcctggggttgaagatgaggagggaggatattttcaaaggagtgggagatttgcattgttgaacgtgtttgatgctatctcctgagtttgctcacaggtccaagatttgagataagtagttagattttgtggattttatctgcctcctccacaaaccattaactttggttatccacgtgagattactcctcttgagcaggtgcaaatggattttaatgtgaacaagcaccataaaacgagaactcccaaatctatgcaccataaaacaaggactgccccaccccccaaatatatgtaatgttagcaatgtggaagggtcgttgtgactcctggtaatcagatcttcatttgtgtcacattctctctagatgtaataatgacacttcgtggacagttttggccagcaatgtctcaaatattatcacagagctccctcgccgtggcaggagtaccgtggagggacgagtgtccttcgccaaagtggaagagaccatcgcagttcgatgcctggcaaagaacaacctcagcgttgtggcccgtgagctgaagctggtggctcccagtgagtttctcagtaggcagcacaactccagctcaccagccacgccctgtgttcctcaggtgggacgtggaatcccagacagggctcacagagtggcaaaggtcccaagacagttcagccctgtctggacttgaagcactggtcttcctgccaagccccctttgtttgccctgacccagctgcgtttgcagagctgcaggcagctttgcttgtcatgtagaggatgactaagcctctgtcatctgagcactggggtctagggatagaaagtgaggaaggggcttttgcctcacgatcctcagaacaggtgggtcaggtttgagtcagaaacaaagaaaggaaggaagccgagaaagagagagagagagagagagagacagagacagagacagagacagagacagaccgagagacagacagacagacagacagacagaaggcaaaattcacctttaccatgaaacttatgagatggatatttctacaaataaagttgctcctaacttattgttggtctccatcgtctttattcaaattgtccaaaaggagatccttggagtgtctttggaaagaaagtctttgtcccagggaagaatcacatttagttgcaagggtacaagtgattgagggatgatataggccacccctaaagtgacctgggatccccaacacttccccaccagcagggagataggccctagttcatttctttctgcctcccgtcttattctgccgtccacaaataactgacaaaattctctactgtctctgtcttgccttccagctctgcgatctgaactcacagtggcggccgcagtgttggtgctgttggtgattgtcattgtctctctcatcgtcctggtggtcatttggaagcaggtgagtctttggaaccattagaatgagaacaactgtatccttcggtgtttggttcagagaaggggtttggtaattccatgggtggtgggtcatgacagactttcctgggtccagtcactttggttctgtagtgaagctcagttgccttgaactctgggaattcaccagttacccaccctggtcattacagaaaccacggtatgaaattcgctggagggttatcgagtcaatcagccccgatggacatgagtatatctatgtggaccccatgcagttgccttacgactccagatgggaattcccgagagatggcctcgtgcttggtaagttcttgtgagggtaacctcccaggaccccaatgttacctacatagcttgctacgtacagatctgggacagaattagggacttgaacgccactcacagagctggatatggtagctcacactcttcatctcagcactggggagactgaagatggaggactgtgagttcaagactagcctgggctacatggacatcttcaacatgagctcattggggctgagaaggggaagtcaagggtcaagaagttgtttagcctttgtaaggccccagattctatcccccaaacgaacaaagttagtgcaccgggtatagtagcatacagttggagggcatcagcagacggatcctgagttcactctcatactgggtttcaggccagcctaggctacatgagaccctagagcaaaatgccaaaaggaaagagtcttttcttttttttaatgcacgtgagtacactgtagctcagacacaccagaagagggcatcagatcccattacagatggttgtgagccaccatgccgttgctgggaattgaactcaggacctctggaagagcaatcagtgctcttaacggctgagccatctgtctagcccatagaaagaaagtcttaattgtatcattggaatgattttggcctgacaaaaatattgcaatggaaaaaataaagttcatttttataaccgaagaggactagctgagaagtgagagaactcagtgggctacagtcagtccgttttgaggagtcataaaatacttctttaagtatatgtaatgtaggatggaaaaatatacgctggtgttgtactgcatgcctctaatctcagagacgtagtattgggagtccaaggtcattgttaactatatagagattttgagactagcctgagctatatgagatcctgtctcaaaaccccccaaacannnnnnnnnnnnnnnnnnnnacacacacacacacacacacacacactttaaagcaaaacataaaaaggaagggagccctctggggctatgtcacaatcaaggccctcgccaggtgcagtttttggctatcgtctgtctgtctgtctgtctgtctggttccaaagtacagcagagctaggcgcttaacagtcactcaagctgaacctgtgcttctttattgtattgtccaccactgtttcccacacagagcttagggaagttaaaaagcagtaaaataggcagggagggtgggtgggtgggtgtgcgcgagtgctcgctcagaggtggggatggagtagcagagcccctgctatccagcacgttgcctcgtcctcttggcaaggccacattactggaaaagcagcatctttctaggcatggatggcggaggtacatacagaccggaagagcgggcatgtccactctcagtgtctttctgtgcctgggctgccgtgatcagactggcttcctggaaatgcctcccttagaccacagtctctttaagagtggacaacagctttgatttctttgtctctacacacaaagaagggctgtgctggcacgtacacccccccatcccccccccccccaagtccagggaccttggtggcacgtacagcttctggtccaggaaccttcctttatgacaaagaagacgagtccaagtgttcagtagtgcactcctcagaatcagtggcatttggaatacagacgatttccagtggttaaggatttgttaatgcaaaggttgcctctgtgtgcatctgagagacagaagggtagagaaccagggggttgggtagaagccacggaggcaagtgcacaggagcccagggcctggcgggagcccatgttcacaccagggaggactgtgctttcccctctctcatccatgttttcctttccattgcaaatgccatttgacaaaagcaattacactaattcccttccctgtgggctcaattcttttttttggacatgatgacttggaggaataattaggcttactcaacacaggaaaaacacccacccagctgtacaccctcgtgcactggcctctgccagtgaggccgaggggccgggagctggcggtgatggctctgtttgcctacaggtcggattttgggatccggtgcatttgggaaagtggtcgaaggtacagcttatggattaagccggtcccaacctgtaatgaaggtggctgtgaagatgctcaaacgtaagtgtttcttcccagggatactttgaacatggacatactaagtaatttaagagtaaaatcgaatttaatattatattgagattctttggactgtgggttgagacttagccaccctccaaaattaggtttcttttgttcttatccctcattgttaaaaatcagatgctttcatttttggtaagagtttgtttttttgtttttttgtttttaatcttaaagaccagagactctggggctgggaaatggctcaatgggcaaagtgctttctgcgaaaacatggagatctgagctctgatccccccagcatccatctaggaaggcagaagtagtggcattcccctgtagccccaaccccacagggaggcaggatgagacaggtaaatcctggaagctcactggtcagctaggttactcaactcggcaagctctcaggttcactgagagaccctgactcaaaatataagatgtagaaacagttgaagaagatattctgatgtcagcctctggcttccatgtgtatttgtagacaagggcattcacacacacagacacacacacacacagacacacacacactcagcagtctagactgaggagaccatctagtgctcttcctttagactcttggtaaataaatactattgaatcacaaggttccatgtgttcttctgagaaccagaagtagggagttcagttgtactaaaatctggcttacttcaacagccacagccaggtctagtgaaaagcaggctctcatgtctgagctgaagataatgactcacctggggccacatttgaacattgtgaacttgctgggagcctgcaccaagtcaggtaggcgccttgttctggggttcctgggagtttctgggaatcctctttgttgtggaaactttttgttttgttttgttttggtttttcgagacagggtttctttgtgtagccctggctgtcctataactcactttgtagaccaggctggccttgaaccaagaaatccacctgcctctgcctcccgagtgctgggattaaaggcatgcaccaccacgcccggcttattgcaggaacttttgaaccagtctcaggcacagattgccctctctgcacccccaaacatgcctcctgaggataaagctcatacgtggagctcactgggtcccccgactttttggaagttcatgggttcagagaaagaatggcttctttctgttctccatttttatactggactgtttggtacccacaggtcccatttacatcatcacagaatactgcttctatggggatttggtcaactacttgcataagaacagagatagcttcatgagccaacacccagagaagccgaagaaagacctggacatctttggattgaatcctgcagacgagagcacaagaaggtaaacatgagaggagcacgtgtgtccttgtgtcggactcagacatggagaaaagcctgtcctgacaggttccaggcctgcagatcctaggccagcaccagaagccacgaggctgggagcctacctagccatccgcgtcagtgtggatgggtacacactgcaggtgtcttgggctaggtcatcacatggcaaggctgtactgattggtttgaatgacggggtgagggggggtgggatccttctgagagccattctcttctctgtatgtgctttctcaggacatgtcaaaggatgtcattagtgctcatccccaggacgagttgttggtccttgctgaacctgggccagggatattcgcttgtctctactgataaaacttccaggtgtccgtaaagacccctgagagtagacggacctcccatgctcttgagtcacttaatgggctccaaatgggtggtcagtttaatgagtcgcaggaactgtgtgtctgagccacatggccacatggccactgaaccttcaggggacagtgactgccttcctgtcatgaacttttcaacagtttagtgtagcagactaagaatgtttcttgtgtttatgggaatgtagcccccaccctgacttccctgtggctcctggggatgtctctgctccttgtgaggatgtgtagaagacagagaagtaaaacatgaagaatcgggctggagagatggctcagcgattaagagcactgaatgcccttccagaggtcctgagtgcaaatcccagcaactacatggtggctcacaaccatctgtaatgggatccgatgccctcttctcgtgtgtctgaagacagctacagtgtacttacatataataaataaataaataaataaataaataaaaccaggaagaatcatggagactaccttttggggaccccagctggccctaagatgtttcccttctatttagatggtatcgatgtacggactctttagaagtgcttgcttactcctggatagagttctgatgccttccatgtcaccagagtcatcctcccttcccatcacactgggtttgagatgacctgtgcgctcatgtctgattaatgttcatctgtctgtctggaccaccccatgcacagtgtgcccatggggattgtttatgctcatccccaagcccttgatacctctctcagttaatggcacactctaggtacccaaattagcatgtgtttagttctctactgagtgactgcattagaggccacccggggtgaaatttcttcttcttcttttttttttttttttacacagttatgtgattttgtcttttgaaaataacggcgactacatggacatgaagcaagctgataccacacagtatgtccccatgcttgaaaggaaagaggtttctaaatactctgacatccagagatcgctgtacgatcggccagcctcctacaagaagaaatccatgctaggtaaaagtgcccatgctcattctggcaaatatgatctttctgtggtttaacttgctgctcagagggagggaaaccgggatgacaggtagctctgccaagcagtgtgctccctaagtgcacggctgcgcagctgggccaagatagctttttgtagatttgtgctctatgtgtgagaagaataaagacgcagggttgctgatgtagccctatggtatattgcttgcccggtgtatacacagttccttctctggaactgaagaaaaagtatatactattgtaataataataataataataaagacagatataatgtaatcaatttctcagactttaaatgtagtggctttaaataaataattcattctgctatgatggtctttgcttgttaacatgtcttttgttaaaaaaaaaatggaagtggtgataattggtgttttctcaatggccaatctgaaagttggcaatcttacattgtttcctcacattttttgttttgttttgtttttcctgtgagcgccataatcctggcttttagctctcctaatgtacatgttgtgacactaactggagagcagacagtttgaggttgcagtatctgacaagtgttcctgttgacttttgtttgaaagcaaacccccctcctgttttgaaaactgtgctgggatgagttcatttgtaaactccggggtgccaccggtgatgccacaccagatgggccacctcatgccagctctggggtggcgactccagggctcttgcttaaccacacactcgaagtgagcagtatctaggcaggcctgagcttttcctgtgattctggttttggggggggaagggggggaattgaggctctcatcagctgctgcaataatattcagctgccatggagattgttttttgaaaaatcgctaacatgctctgaatgctttcagggttcttaagtgaaaggtacaagccattaaaaagtatgtgctggctttgcaaaacttaagcacgtaataatattttccagttctgtagctccgtccacttcccattgccaaatggttgaacttccaaaccttcttaaagtttacccagtgagagttgttggaacgctgttacctttccactcccaaatggttaaaaatagtttgcactgcttcccaggcagagctggtggacttggcaccagggagagggggcccgagtcatgcttgccctgggtcctgctggcaggcagaccacagttttctggccttcctatagctggctgaaaaaaaaatggctggagctgctcatcaccggcctgcaaatcatcaaaaagtactgagcaccactggcctagattgcctgcctcctgagtgtgtgtgtgcagggcagtggacaggttgcaaggggaggtccatgccccatcctgggcacggcccttgaggatggctgcctgctctgttcaggaggtgatttaactggcaaattagacacaaagcaaaataggaaagaaagcaaacctcagaatcatcatggatggtttcagtgtgtgtgtgtgtgtgtgtgtgtgtgtgtgtgtgtgtgtgtgtgtgtgtgtatgtgagagagagagagagagactccaagatggctgaggtgatgtgacaaggtcaaaagtgaaatccaaggtcaaccgacaatctgtctgtgagattccgtggagggagtaggtttgactaatcattgtgtgtataattctccccctgccccgcccagtctgtgtttgtgcctgccggatgaatatctcttatctgaaacgcttggaactgaatgtgttttgaatatatttttttcaaattttggaatatttgcatatacataatgagatatcttgggtttgggagccaagtctaagcacaaattcatgcctgtttcatgcacacctcagacacatagctgacagtaattttatacaatatttttttagtgtgcttgtgttttgactgtgatctgtcacatgaagtctggcatgaggatacttttaccagcgtgctggtgctaaataagttttggatgtttgaagcatttcggagtcaggattttgggtctgggatgctcaacctgtgtatatttcttttggaagaaagaactattattttgttcctttctatttttatagtactagggcatgaaacgtgtgcctcgtgcctcctgggaaaatgctctaccactgagccacacccacagcctcctttgtatacttttttgtacctagtaaagtctaaaaattatgacaaaaatgtgttcaaaagagatctttgggcaagcttctgcaacctgccagacaaggggatggctgggtactgggacgccccccccaccccacttttacctaacaccaacatatttggttccttcccacagactcagaagtcaaaaacctcctttcggacgatgactccgagggtctgactttgctggatctattgagcttcacctatcaagttgctcgaggaatggaatttttggcttcgaaaaatgtaagttcaaggcccagagacctcttcagacccagccatgccttcagagggaggggcatgggaggaaattggaggaggaaggtctaagagccagagtatcagctgctcagtttaacccgcctctctcacttcccctaataggctgggagtgtgactcactgggagtctgcctttctccaggaggagtcagggaggggagggaaagggcttcctgccagggcacttttaagtgcccatcatggactgggtggtcttgcaggagtgctgcaactgggccttggctggagccattctgaagtgatttcttttcttcccacgtagtgtgtccaccgggacctggctgcccgcaacgtcctcctggcgcaaggaaaaattgtgaagatctgtgattttggcctggccagagacatcatgcacgattccaactacgtgtcaaaaggcagtgtatgttcccgccgtcctcgatccttctttccccatccctttaatctcagaagttctgttatttcttaattcaggagccagttatcagctggttccagaggtctcatagggaaagcttaggtataacagtcagacagcctggtatcagctccaccctatactagggttgctgtttggtgaagtctcttgtctatttcatgcctcagtttctctgtttgtagcttcatccgtttcctaaattactacaagggaatgatttaggtaattcacacaaagtgccgtagacagtgctggacatatagaaacatctatcaggatctggatagatggctcactgtcacatgctggtcttccagaggatctgggtacaatttccagccctcataaggcagctcacaaccacctgtaactacaggtctagggatctgatgccatcttttggcttccgatccatgtagcatacagacattgcaggcaaaacacccatatgtgcaaaattaaaaattaaaaaaaaacaattagacacatgcagtgttatttcctagtaaatcaagtgtgtacatgaatatacaagtgttcatttccaggggagagctctagtttttaaacctctcaccagatttccaacagaccagtttaaccttgagaacatcaagactgcttgaatagatagaacatcaccgtttctttggtgatagtttcattgtctacttgatcctccctcttccatcccttcagcctgtaagcccaggagtcgctgaggacacatctgtcacccattggtgcaattatatgtccctctgttccactgatgtaagacagcttactgggctgcagcctctgcttagaggacagtaatctctgtccgtgctctgtgccccggactcgggctcaatgactgtagccgtggctcctcccaggcaccccgaacaagttgctaaacttgggtggagatgatttcttacctaaggttatgaatgtctactatttcttcgtagtctgggggaaggggtgtgtgtgtgtggaaggatgctaacatgaagggcgctgtgttatatatcttcccagacttagtatttcacctgctgtttggaccacctttgcaaaagagacgcgtttgagtgtcttgtctttcggtggtagaaaaccaaacttatttcttactgcttggaagctgacactggtttccaggatgctgtatctatctattcttagttttgttcctagggtggcctgaaaactggtctggtcgaaggccacactttattggtaaattgaaggttgaatatgcttagcatatcattcctttggaagctatgagaagtggcgttgaccactccttgtctgttattattaagaatctacacagtggggctaaagagagagctctgagagtgacgtgtttgctgtgtaagcaagggcacctgagtttgatgtccagaaagcccgacatagtggccagtgcttgtaacctctgtgctggggagtcagggacagacccctcgagctccttggctagatattctagctgaattggtgagtcccaggccaggagagagcctttgacctccacatgcacacacactcatgcaacaagtacttgcatacacacgggcatacacacacatacacacaacctacctagttgctggtgaacagtaaacccatgagagacagaatgctggcaagatctttaatgcattattcccagcccaaggagaacccctttctgtttctccagacatcagagcgtagcccgtgggttcatttcctctctcctttcccacagactttcctgcctgtgaagtggatggcacccgagagcatcttcgacaacctctacaccacgctgagtgacgtctggtcctatggcattctgctctgggaaatcttttcccttggtaagagctcaacggctactgtggctcattctgaatggcactagaagggacatgagtctgtcccagttccagggggacacatgcagtgtcaaccagtcacactgaagcctcactccacaggtttacccctaccatgtctgacataggctgagtagatccagtcagggtctctgtgggctgcttcctcacccctggctactggcactctggttatgcgggagtcacttgcccccgtgggaagtgtttcccatggcatctgccttttcattttgaccttgattagagagatcaccaatagttcctctcccttacttgatgatgaatgatgcccaggtgaaaggtgatgtggcagggaacccgaggggtgtatgtaactccacatctcaaagagaaaaaaaccgttcttaacattcggtcacttgtcattagggcctgagcaaatcaggtgcctgctgccaagggagggttgtaagggaatagtgaggtttgactggactttggggatatacagattacacacttagaggtaaaccctgtaagctgtagtgtgggttcagagacaagacaaaggagacttggagtcgttttggaaacttcagagagggaattgaacttgacttggccttggccatcccacacactgctaccccttcagttctcctttttctgaggccctgcatgcccttaaaacatcagactatggactgccaggtcctagctttgccttgggctgtgatttgtgaacacttctgaagatgatgttctttagtggcgtagaacacctctccgcctcgttcgtgtgtttgcatttagatgtggttgctagaaacagcattcagtgcgttagtgaattttgtgctaaagttgcccaagacgcttggatttagtcacccaagaccgctatggcaagtctgaaaagtcctctggagtcaaggagatgaaaatatacagattctttgaaagaatcaggccctcaggggttcaggatcaaaggtgtgtggtacaaggaaaaaccctctgtcatcgggttatctctggctcgtaggtggcacaccctatcctggcatgatggtcgattctactttctacaataagatcaagagtggataccggatggccaaacctgaccatgccaccagtgaagtgtgagcttcctcctcacccacgggcccatgtccacacttgggggggggtgtctgtggggtggctgccgtctacgggcaggcccacactcactctgagctctgcctctgcagctatgagatcatggtgcagtgctggaacagtgagcccgagaagagaccctccttctaccacctcagcgagatagtggagaacctgttgccgggacaatacaagaaggttggttcgagcctgtgacagtgggcaggaggaggcgggaaggaggagagactagtgagcagttatgccaacaagcagagctgctctgagctgtttgaaaggaacgctttcaaaggaggacacggattgtgtgatcttgtgaccagggctttggggagtgctctataggaccccagtagcactgatgaatgagagcccctccctgcctttccacagggctctctttcatcttaggtgtgagacacctgtaggcacttcattctccagacatctgagtatctgaagctaccaagcagttagaactctcaggacatctgaggccattaaattgctcatttgaatacacttaaatccatttgaaactggtttttaccagctgactggaggggacaatcccagctgttatctgtgactccagctggttttcagtggcacagaaagcattgttcaaagggacaaatgtaatttcacgggacctacgcaggagccgtaaatgaatgtgacaattttccgccgaggccttgagaggggaagccgcacactcccgtgtgatgaatctcatctcagactaggcaccgcagaccgactcggttctcttccctcttgagaggcaacatcagtgatttgccctagagcctctcatcatttgagctgaaagttcagtgtgtcagttttggtccctcagcaccggtttctcctcacattcgtgatgctgggatcgtgtaggggtaatttacctaggtcagtggaaggttctctgttggtgggaagaggaagacactactgctaaaactagttgtctgattctgtctgtttcggccggtgccgcatacacagacggcgaaaatctacgtggtgtgttgactagggtgtgtgcctcagaggggcatagctaggtaatttgtttttgtttgtttgtttgtttgtttgttttttgagacagggtttttctgtgtagccctggctgtcctggaactcacactgtagagcaggctggcctcaaactcatagatctagagatctgccagcctctgcctttgaagtgctgggattaaagatgttcatcatgatgcccaatttacgtttaggcttttttttttctttttgaatctagcctccatacagacttccggtatggatatatagcccccctccccccatcagcataacctcatcactattgattgatttattgattgatttgttgttgctttcttgctgatggccactttgactgggtgagtggcttttcttctttctccagtggctaaggatattgaatgctttttaaaggatttattgaatatttacatttattcttttgaaagctaaatagtcagtttattagccaatttattgactgagtatttgtgtgagtgtgtttgctgctctttatatagcctgcatactaatccattgtctgatgtatatttatatatgtggcagagctttccccccaattctttaccttctcttttcacttttgtgactgttcccaaaaaacaaaccacaaaagctttattatttctttcctcttttattattttattgttttgtcttgtgggtttttttttgttgttgttgttgttgtttgagtttttttgagacagggtctcactttgtgtctctggctgacctggaacttgctaggtagaactcatagagttcttccttcctcttcctccctagtattagaatccaccacacctggatatatatttactgttttacacaaggtctcactatgtaactgtggctggcctggaactctctaagtagacctagctgacctcagcaaggttctgcatgcctctacttcctggattgaaggcatgtgtcaccacacccagctttacattccatttgatcctatttgtcattattttatgtgtgtgagacaaggtctcactatgtagccctggctgtcttggaactcgcaaagatcctcctgtctttgagtgttgggattaatggcaaacatcacttgcccagacccacttgctagtccttgatcatttcctgtgcttttggagtctgactcagaaaggtcttgtctatgtctacatcttgaaatttttttctactaagtctcaaagctttaagtctttcattcaggactttgattcattttgaactgagttctgttcttctagttttccaagttgttaaataggctgtcttctctccagcgtcagcttggcctccctatgtcaaataggtggctatatctgtgtgcttatttctggatcgtctatcttgttccaattgatacatttatttatagttatatagttatagataaactagttatatatatgatatatatatataggctctattatatagtttgaggtcaggtattatgagtctggggattataatatttcaaacattgctctagctatttggggtcttttttttatatgaattttagaattgcatttttagttctgtaaaaaaaatgttgaaatttgttggggattgtgttgaagccaggcttagaaaggcaagaaccatgtttcttctaaatatagaaactaatttaaaattatgtgtgtatacatatatacacatgtgtgcacttatttatctaaatactaattttatttttaaattttaacttatgggtatatgagcatatgactgcttgtgtgtgtatatatatatatatatatatatatatatatatatatataatcacgtgtgtgtgtgtgtgtgtgtgtgtgtgtgtgtgtctgtggaggccagaagtgggtgtggaaatttttagaactggaataatataaggttgtgagccacctaatgtggatgctgggaactgaacttgtgtcctctgcaagagcaacaaatgctcttaaccactgagccatctcaccagtctctatatgtaaatgtatacctgcacatgcgcacacctaaacatatgtgtatgcgtaggtcaggaagcaagaaaggggatcgtgagaagggaggaagagagcttaaaggttggggtggagagagtcatgaaatatatgtggtaaattacatgttctaaaagtctgcatttattttacagtttgtcagtaacatctgattaattgtgttaaatgaatactttcagagttatgaaaagattcacctggacttcctaaagagtgaccatccggccgtggcacgcatgcgggtggactctgataatgcgtacatcggtgtcacttacaaaaatgaagaggataagctgaaggactgggaaggtggcctggacgaacagagactgagcgctgacagtggctacatcatccccctgccagacattgaccctgttccagaggaggaagacctgggcaagaggaacagacacaggtaactacagccaccttcctcgtgctagcctgcaggggaggactcagggagactgaggccaccagggatgtaaactgtgcgtgggcaacaggtgcatcattccagggtaggtcacaaaggtttgaaaatacctcccatgtgattctgaggtgtcctcttactcctggtgagcgcttcgtttggtcaccaaagctggtgatgaaaagctccactctgagctcatttttttgatttatttatttattatatgtaagtacactgtagctgtcctctgacatcccagaagtgggcatcagacctcattatggatggttgtgagccatcatgtggttgctgggatttgaactcaagaccttcggaagagcagtcagcgctcttaaccactgagccatctctccagccccactctgagctcttttttttaaaaaattaggtattttcctcatttacatttccaatgctatcccaaaagtcccccatacccccccccccactctgagctcttaaacagccatggagcaaggaaaaccttgagagaggcggggttgggatatgaggtgctccatcaacagcctttagccttgcatgcggtgcagaactagctggggaggactttcaaactgctgattcacaggcctctcaccctgtcagtctgtctgtccctccttcctctggtgggctgccttctacttctgttttgtgtgacgcatagggaagccacctcacaaaggggaaggagtcgggggttctacccacctgcagatgatcgtgaatttcaaagactcagatggacaaggcacatggtgacccaaggcagaatatggaaaagccagcaagaatctagagaagggaggagaggtggggattttgggcaggctggtgattttagggatagtaacactaacacctaacacttttgttttaaaagtgtttagtacacagtagcagtgagtacacctcccaattagtgggtacaggggttgacatttgccccattctctttatccagattggtgtcacataaatcatcatgactacagacacacacacacacacacacacacacacacacacacacacttatttctcacccagtgactgaaagctaagtagaaaacaccaagataattcattcctagtattctgcgacactctttcctaagaatacgatcattcatgctgtgtctatcatgaccacacggaagagagtgaactgttaaagaaaattagagttggaggtatagaattcatgttggccatatctgaggccataggttcacatccctgtactgaaagaaaaaagagaagaagaaaaggaagccaacaaccggtctcagattcatttcatacctgggctttattcaaattcagttgaataataactgctaatttattgagctctttatatgtttatagttatcagattattatcgtatttaatcatctcagagatctttatttttatttttattatgtatattttacttttgagattatatttatgtgtgtgtgtacagatctgtacacctaagtatgtgactgcaaccggcttagactgtatgatactcgtatgtgtacgttttcggggctgaccatttggtattggatagccaatttggtgtattcgtccctggggaaggccctttttctggttctcaaccttccttcgttatctgtcgctcttggtctagaaaagaggctgcctgagctccttgcttacccattaccgtgcctattggtgccgttctggtgcaggtcttgcgggcaaggcttctatgccttgtgtaaatggtaaactgaagacttttctcttctgggcctttagacccagaggggcggggtgaacaagaggcaggggcctggcaggaagtgaaggaagtgtgggatcccatccttctgcttcctaaggttttttttttcccttctctctcagtaccttttgattggctgttgcttgttctctcccctgataggctgaggagggaaagtagaaactcttactcttgttagccacgcccacaaaagacccctggcaggaaaggcagcaaactgacctgcgcagttggccctgttttggttttgtgttggctctgtgcagcaatggccagtgagtggctggctggctcagccgctcactggccatgctcggccactcatgcttcaacaggaaaggaccttgtgcatgaggaaagagtcccgctgcttcaggcagccaccctggaaatgcagccccgtaggcagtctgtccatgaccttagcctttgcttttcaatcccatcagctcacagacttcggaagagagtgccatcgagacaggttccagtagttccaccttcatcaagagagaggacgagaccatcgaggacatcgacatgatggatgacattggtatagattcctcggacctggtggaggacagcttcctgtaactgacacgctccgggtatcatcttctccgggagcctcctcgggataaccttaagaaaaccacttcattgcaatgcaaaagttgagaagaggacttgggtgatgtggagagagaaagttcccgaggccgagggccttggtaagcctgtgtggatgactgggatacttggattgaactttatccgtgttgcctcttgcaacgcgtcagtagcatctcagcggcgtgtgcggtttggaaatggatggacaagagagtgactggccacagaagacgggctttgtgtttccagggcatgggtgagagtcccacacgcgccaacttgtactgcagacaactccagcattgtaattatgtaaataactcttaaccgaggatgggtttagatctgtgttaactctcctctccggacctctgaagagaccactcagtccacccgtgtgcttccttccttcttggaatccggtaccagctgctgttgaattttctcatgaagtacatgcaaaaccactttgaactttggaaggtactggaaccgtcgtgttttactgtcttgtaagtgttaaagaggcaaaaagataaaaactaaccaaccgtgagtagtaggtttgggtcttttagggcacccaagaattcctctgtatcttgtaatctgtacttataacactactactgtttaacaagaatgctaaatatgtaatccgtaacatgatttctttacagagaaagcacaattaaaacaaaacccttactaagaaggtgacaagtttggcagtttttgacatttatattaagtaacacgtttctcaataaagtataataggtttagcggattaaagttagcaaacactagagagcagagtgtaagtagttatccagaaagtcaaacctttttgttttgttctaagcagtctccctaatccaaggcactaggaacagttaatgacctctgaagtactgggataagcaaagcagaaacccggtgggtgtcctaagtgttctcagtagaaaggcgtacgcctgagcccagtgtgactcctcacgctgtgtgcgaccttctggaagagactcattcacaaaaaggactcagatgggcagaatgtccatcagatgggactcagatgtctctcctgaccagtgatggcttggatggatcccgcccatacctacttttaaagtctgtgacttttaaggatgcttcaacatcagcaccttactttttctctcttgtctcagacgagaaagaactgcaaaccctgagaccacaatggtgctgttgaatgaaggctatgtgggcatcagcttggctcttcccttcccaccattaactacagctacagttactagcctcaatggtgtcagacctttgccccagagatttggaattacaaggtctgacgggagcaggaagctatatatatgaactgcctggtgctcttgaatagtcagtgttcagaaacactggcttgggttactgttgggggagggcaactttgaaatttggaacggggctagaagtcaaccatgcaggaaggctactgtttaagttcttggcttcatgtcaataacatgtcaatgccacgtatgcagctattcctacccttgatttaagtttccaggcttggctgaggctgagaaagcaaacatcttgacttgggaacatcttcccattctagtcaacgtgggtaccacttccccctggatgggagaacctgagcttgctcgcctcaaagtgtgtccgggaatgatgcaagtctgtgtgtcaggtctttgtgcaaccagctccatattcggtggagaagattaaaaaaaaagttttctgaatttggggcctttaggtggtaggctatcaggagcatccgaactgtcaaagtggttagtgtgagttcattggcattctctgccatgtgtctaattgctgactctgtatgaatgaaacatgggctatgattactgcaatcactgtattgcttctagcaggtgacgctttggaaggcacagaagcaataacaaggtacttgactacctactggcataatctcaatgcaaaccccaactttcccttttcacagtaagtgtgaagactgagccagattggccaattgaaaaacaaaaacctgactagagtctttcgagccaattagacttgaactacatccgtctttctagactcgtggctggagcagtctgtttaccactcatttgcacagcctctgtttgttgcttctttttattctgatgtcgctttgggccttgcatgacaccatgaagttggatgatacttctcagaccagcagtttcccatctttagctgtacccacctctgagattcaatgggaatacgttcacttttgttttttgagacagggtctttctacgcagccctggctgccctggaactcactgtgtaaaccaggctagccttgaactctcagagatccactgtctctgtacccccagtgctgggattacaggcatgcaccaccacactcagcagggatacatttttatttttaaacagtgttttgactgtatcctgatttgttttctttctggcctcctgcagagtccctggaagaaaatttaccaatctttcctgctttctatttttatgatgacaatcaaagcttgcccgaggaacacaatttgtgacttttaaaaaaatgatcaatgatgtccttaaaaaaatgtggtctgccaacctgtacaaaatggtcctatatttgtgaagagggacgtaagataaaacgatgttatacatcgatatgtatatatctgttgctatgtagacttggagaatactgccaaaatgtgtatgacaagctgtatcactgcctttgtttatattttttttaactgtgatattccccacaggcacgttaactgttgcacttttgaatgtccaaaatttatattttagaagtaataaagagaaaaatactgacatgttcccaacatggtggtgtggtaagtgtgtgagagcgacttactccataggaagggtcttccaatacaagatggcttccagatacccctgttcatgttttgttttaaaaagtgtaaatggagatctttatatttcaataaatgatttattatatatgacttaacgttatgaaggtctaccacttctttcgctttgttttttagtttggtcagaattccacccaaccctctctctaatgttcatcctgttgttagtttgaggcaggatcttgttgtatagctctggttggcattgggctttctgattctcctgcttcagcctccaaagtactggtatcatagacatctagcacaatggccatcttttcctcctcctccccctcctccccctcctcgtcgtcctcctcctcctcctctccttcttttctgaatagactcactagttagtaaagcagttttcggcttacaggacatttgagtggaaactggagatctcccatatcccagttggcatcacacacgagtagcttccccgtctctatggtaacctatcagcatgtacactgatgagcctgcatccctgcgccatcacctgtgctgtgcttgagcatcctctgttacgtgcaggcaggtttatgtgcttcacattcgacagcctcctggtatctcatcagataaattagtgcaattaattaatgcagattattctcttaataattggaaaataggccccctgtttcagaataactcccaatttcagatagccaaatgacctcagagtgagaccgcctacagatccaggcctgtatccttcagcacaaggctgttcattgagtattggctccaccttggttcagcccaggaaggagctggattcctgggaataataacatgtctgtctgaacagcagctacacagttccgtcctctaacagacagtcctgtctaatttatctgctctagtgttttcgtttttttttttaattaggggattaaaaacttctaaaatgtaccatttacacttcttttgagtcttgcaataagcttttaaatattcctaccaaggcagggaagacatctcataggtgtagaaacgaaggaccccaagactaatgtaacgatagcactaggattagcaattccaaatatatgaattccactattatttgcatgatgagccagaaagaaagcaagagatactgagaatatcagcatgcagaagtagcttgcctggatcctttgatttttcaaagacaagtgatggacaagttcagcctggagaaactactctatgtgtttgtaatcagagcctttctttttcaggctgaaatacaccaggtctaataatggccattgtgattttaatagtggcgtgcttcatgaaaagcaactcaggaaaatggcctaccctatgagaatccatcataagcctggcaatttccctcaggataacagcaacagaaatgtttcattatcttcaactccaaatacacataaaggctaaatccaacagcatataatggtagcagtgtttataatagagacaattgtttcatctcataggaaaatgtgtgtgaaagtatatgtgtgttcttaattagctgtctatagcatcctgtcccacctggagacatgagtagcacccacgtcctaaagtataatggcgataacttcccaactaagttcatatgccagtaatggtccatcattcatacaaagaggagggagacgttgaggacagatgaggggaacatatttgcttcccctgccccaattctggtttataggctaattggaatttttaaaagctttgccacattagcccggcagatggcattttgcttcatcattgttcatgggtattaatgacttccccctggagcttgtgcatcctgtctgttttgaatttcatcacatttcacacgaactgctccaaacagaatcagaaccaggcttttctctgcagagactgggctggagattggtttggtctatgtaagttggaagcctgatcaggatgaagctgaaataaaaggaggcttttgtgggcctgggcttggctcttctgtcgtctcacgcatgttttgtttagctggctctcccaacgggctcccggttgaatcaggtgtatacagagccacttccagagtgaatgcatcctcatgagtctgggatgatcacacctcttttcttcctccctcaaaaggctgtgtttggttttcccatgagagcacggtgctaggccagccacaggaagccatttttaaaattaattctctccaagaatatttattatagaacagactcctctttgtgtagttgatctctaaaatgtgtaggcctaaatgaggaagcttgcagacttttttccaaccagctcatgatccaaggggaccattacatcacatagaacagcaggatagaacatcgcggttggagaccacacgccttgcttggagtaatgagaagtgtaaggtagtgtaagaacccagagtgctgctcgctgagtgctgttcactgagtgctgctcgctgagtgctgctcgctgagtgctgctcgctgagtgctgctagctgagtgctgttcactgagtgcacccgatgaagctgaagcttttccgcatgtggggaatacacataggcaaggggccgagggctgggagctggcagctttgtctatttcagatgctatctttgttctagttccggacagttccaaggcatctgcatatctctttccacacttatccctccaggtttcaactgtactgagcagggcattggtttaggccctgggattcagcaattattacagacgataaaaccgctgcattgtgtctatagtgcctcccccacagcacaggacagcactgttagagttacaaaggcagtgtctctctctgggggcagaggctgtcaggcttgcttgcagcttattgtagagtctagaatttctcttgtaaaaaagggatttttacgctagtgtgtgtgtggtatggtgtgtttggtgtgtgtgtgtggtatggtgtgtgtgtgtgtgtgtgttgtggtgtgtgtacatgtgtaggtatgtgtaagtgagtatactatgtacctgcagaggtcagaagtcttggatccactgatgctgaggttagaggccattgtgagctgctgagtgtgactggagctgaagtcaaaggtcattttgagccactcaattgagtgtggatggaaattgaacttgggtcctctgcaagagcagaatacactcttaactaatgagccatctcttttgccaagacctgtgtgttactgaggattctctagagtcacagaacttatggaatgtctctctctataaaaggaatttcttgtaatgacttacaatctttagtccaactaacacaacaatgggcagctgtgaatgggaagttcaagaatctagtagttgctcagtcccccaaggttaggtgtttcagctggtcttatgtgtaagctggaatcctgacgaagtaggttccaacagatgtgctggcaagtaagtgcaagaggatgaagaagagtgagtccatatataggcctccagtataagatgtggcccagattaaaggtgagtaccactattcctggatttggaaattgctttgtcccaggctggctttgaactcagaaatctgcttactttagtctcctgggattaaaggcatgtaccttacctgggcctaagctttttaatggccactatgcctcaagatctccatgttcagatctaggtcagaagtccatgtcttccagccttaagatatgttctccatttctggatggtcgttcattccagatgtagtcagagtgacaacctggaatagccatcacacctgaattactttttttatttgtttttgttttgtcttttttttttttctaagagagagtttactctgtgtatctttggctatcctgcaaattaattggcagaccaggctggtctcaaactcacagacatttgcctgcttctgtctcccagtgctgagattaaaggtgtgcatcaccatgctgggcttggatttcttaatgccgtcagtcctcagtagacatggagatcagcaccaggctcccatacaaacgtaaaactccccagtgcctcatgtaaggcaaagcaatatctgcacataacctatgcacgattatttgtacactccagagcatatctagtgtaggtacggtactcattgcaatgtaagccctgtgtaaatagcggttggacattatcattagagaatgataacaacacagaagtctatgcatgctttagtgcaatgcaacttacccagagcaagagtgaccatgctcaaccagtcctgaagagacagggggaggaggcacatctataaaggggcagaaggctactgaggttagatctgtgtgcatggaaagcccatagatccagagggcagaccatatgctgtaattattaatacatctacatatatttggttagtttacttacaaatatttttttttttttttaattttgtgtttgagccagggtctcactatgttgccagggttgacctggaactcactaagtgtctcagccgctcaagtgctgtgaccacagctatacagtcaccttgggctaatgatatttgaatgtgtgtgtatgtgtgtgtgtgtgttttaatttgtacttgtttctactttatagaaatgtaattgaccttatattctgacaccttgtaccctagtgtgcaaatcctttaaaatctctattctgcatctagattaaaacctggcatttgttttcctggatctgttttacgttgcatagcataatgacttccagttgcacccatttcgacccagatgtcatatttgcactgttttcatggctgcataaaaattctgttgtttgcatgcacacatcctctctgttgacggatgtctaggttggttcatttcctggcttttgtaaatagtcccacagcaccttgcgcatgtcttatattgttgttgtttgagacagggtttctctgtgtagttctggctgtcctggaacttactctgtagaccaggatagcctgcaactcacagagatctacctgcctctgcctcttaagttttgggatcaaaggcatgcaccaccatgcccagccttgccccgcttttacaattacatttcatgtatttatttggtgtctttctgtctgtctctctgtgtgcctgcagaggtcacaaggtcacaggatgcctagacatctgttctctcctctcactctgtgggtcctgggattgcactcaggttgccatctggcttggcaggtgacccactgagatgtccatcatgctattctcaaactcacagcaatcctcctgcctcagcctactatgtgctgggactatgggcttgtgccactacacttggcttaaatatttgacctaattctccattgaagctacttgagcttagaaagattatacactggtaaggcataaaatacatattgagatattcaagctatttgctcttgaagaagattaagtaatttacattttctttaaaaatgtcattgtcttgtaaattattagattaatgagctctaagttcttgataaccttcattcttttcttcttcttcttctttaatattggatggtgcgtaatgttgtcctcttgcccattagtggtattgaccattgtgtgctctgcttttttttttttttttttttttttgagacagggacttgatttgtagcccaacatagccttaaacttttggccatcctcctgactcagcccctcatgtattgcaagtccagatgcaacatcatccctgacttgctgtctcaatttttaattggtggttgtgacttgagcttgatcaattttatggatcatttcagcttttggtttcactgtttccctacccccagatctttgtcccatttctatttaactgactttccttctttattatttcttctgcccatttctgctctagttggctctttttgtcttccagcttcttgaggtagatcttcatttatttgagattataattcctgctaatcttgggattttgttttacagatttccccctaaagcattattttagcaacgtcttacaaatcctgtttaaatacagtaccataaataatttgaagtattatcacagtacaaagaaaggcaatggcctttcaataggctgggagaaatggaagaaaagctttagaactgggtgttgaaggcagagaagaaaccaaaagaacaactaagccagggtttgtttgtttgtttatttaaggaaaaagacaaaatcatgagagtaaatgtttgcgatgctattagcaagatgagatctgaaaatggattctcacatttcaaaagtgcttctcctgaatccagaaaaataaaataaaatccaccgaagtcactcgtgcactgaccatcagagtatttgtttgctcgcgtcagggttttgtgtcgctgggttagctgaggatgaccttggactcctagtggtcctgccatcccctctcaagtgctaggatcataggtgtttgctgccatgcctggttacaggcttcgttctaaacaaaacacaacatgcttttcctcacttttacatttctgttatacatcagatctcacagtgtagtccaggctggcctagaacttgctatgtagatcaggttggctttggaccgagtgttaggattgaagactgtagtttttgttttgtcttccaataggtagaaaattcaaattgtctttttttttctttttaaacataatatcttaatttgttctttgagaagtttatgcatgtctgtaatgcattaatgatcgtatcaacccctatctccccttcaactcaactctccccgtccaagtcccccaagacacccccaaaacatcctctccagtatttcttctgtcagtcttgtagttcttaggaccatagttaacaatggagtgtcccctatccacctacattttattatgaagaacttcaaacatagagaaagttgaagagcttaccagccagtttgtgaagtagacagcaaccacccagagcagtggtcctcacctaacgctgggccctttaataaatttcttcctgtggtggtgacccccagctataaaacgatttccattgctactgtataactgtaattttgctactcttatgactcataatgtaaatatttctggaccgagaggtttgccagtggggtcgagcccctcaggttgagaaacactgaccttaagttgtattggcctcttctccaaatctcggttgaccaaggagatgggaaagagcatcagaggtagggcagtttctggttcccagcgcttctggagtgaagtgcctgggtgggcttgagtggtgactgttttcctcaggcttgtgaacttttagaacgtggagtaaagtttcagaatccctttggttcaccgagatggtaaacctgatcctggttccaaataagcaagcactgttcagcttcaattcctcttcagacgctgggctcctaggttctgatgggagcaacttggccagagtgtgcggagaggggagcttcagcatggagcagggcacacagtggcctgtgtttgggttatgcgacaactgagggccagccacttgctcagggtgctctaagccagtgacttgagagtggaggaaaatcttcctccatccttccagctgtgaggaagggtggggccaaagggcactgtcagagttgacagctgtggtccttcacttttgcacccatgagtctgagcagcttcaccttagctggcatcctgctgcgatctgtgaccttttgggaccaagtagagttagaagaaaatggtctggggaatttagaattgtctactgagccccttcagtcaccatcttgctcttgtactttgactgacaggcctttcctctcagcatctttaattgtcctgggctttctgtggaaattccacatttttgagtaacaatagcacctcttagctaggaaagaccgttttcttttgtttcacttcttcttctcctcctgtattaccttcctttccaaaacatttattctgttgtgtttcccaaccactgtgctgagaacaataggaattgagagtctagtggggagtttttataaactggaaactgaatttaaatgatggccgagttagtcaatacctaagcagtcctgaaacattctaactaggataactgtgaattgaacttgtgtgcatgcgtgtacatgacagggagtcttttttgacttaggtttgtttgtttgtttcctgagtgtagagttttgtgtagattgcagtaggtgaaacccagccagtctagttccttgtagctcctttgctacagagcagcccaggagagtattcctgatgctctctacctgggaccatgaatacagtctccttgactgttctgttctcttgagaggcccgctttgttgggaaaggccagcaacagatcagatggctaatgaatatgagtgagtatgcttattatatgcagactcccatcactttcaaaaatactattttatttatccttagaaacttccatacaatatatttggtatatatatttgatcatatctatccagtactactattatgacatttaaacaacaataacaacaacaacaaagatttatgctgggtctgctctgctagttgttgcttttaatcccggtgtttgggatgcctatgtagaaggatttctggtctacacagtgagctagcctgggctatatagtaagcaccagtcagctagagctacatagtaagctcctgtttcaaaagtattactttttaaaattttaattgtgtgtatgtgtgtgggtatgtgcatgtggctgcaggtgcctttagaggtcacaagagctggggttccaggtatctgtgagttgcccctgaagttaagagcagtaagcattcttaaccgctgaccctgatctccaggccccctgttgttacattttatatcagttttatgacatcacacaaagtcattctgttttattgtcatgttactggtgggactggaaatcaaacacaggaccttggcagggaaggcatgatgacaggaactgagatgcttggtctcagtgcactgtcaggaagaagagagtagacaggaagtgaggctagtttatagaccctcaagccttgcccctagtgttgcacttcttccagggaggctccacctaccaagtttggacagtcttccctgacagcgtcaccagctggggccaagtgctcaagcacatgagcctacagggatgttttcctgtcactgtcagtccacattggaaatactaagaaaaggaactagttgtggctatgcacttgggattggttgcagggttagggattggttgcagggttagggattgattgcagggttaggggtcagtggtttgattctcaggcaaagctggatagaagagaagatacaaacaactgtggtggcaagtctagccctgagtagatgctgtacgggatcatgatgacattcaaacaaacaacgaaccaaccaaacacacaaactgaaccaaacctacaacagagacgaactgggaaagatgcagtcagagcaggagcccacctccagatacaaagctctttctttctatgaaagcatctacactcaccaaatccttctcttcttgtctccctccatggctttattccacaccgtctcttgtctctgtctctgtctgtctgtctccatctctctctaacagactactatacatttattttatgagactttcttataggcatgccattctcctctttttaaaaaacatttttattgaacatgagtttcacatcatgtacctcagtttcactcatctccccatccttttgtatctgccctatgccctgcaacatcccccacaaaataaaaacacaataaaacaaaacaaaatataaaaaaaccctcttatctgagaagctgtagagcgttacagtgtgtcccacagtacgttcttttgcctacacatctctatttgcaaatgttcattgtgatgagtcattggtcttgtgcaaggtctctgacttgtaatactatatcaatgctggatcctcacagggactcttcttggatgccctgttgttgccctgtgtcatggagatccgacagctttgaatcttcaggactggc

SEQ ID NO: 1429 - DNA, 6556 bp, Mus musculus
tataacattgaatcaattacaaaatgcgggttttgagcccattactgttggagcttgagggagagaaacaaacggaggagctgcggggaaggactggaagcttggggcttacttttcactccgggtatcggattttctttgcaaattgacatagaaggagaaggtctcaggagctatggggacctcccaccaggtctttctggtcctcagctgtctcctcacagggccgggcctcatctcctgccagctcttattaccctctatcctcccaaacgagaatgagaagattgtgcagctgaattcgtccttttctctgagatgcgttggggagagtgaagtgagctggcagcaccccatgtctgaagaagacgaccccaacgtggaaatcagaagtgaggagaacaacagtggcctctttgtcacagtgctggaagtggttaacgcctccgcagcccacaccggatggtacacttgctactacaaccacactcagacggatgagagtgagatcgaaggcaggcacatttacatctatgtaccagacccagacatggcctttgtgcctctcgggatgaccgattccttagtcatcgtggaagaggatgactctgccatcataccttgccgcaccacagatccggagactcaagtaaccttgcacaataacgggaggctggtgcctgcctcctatgacagcaggcagggcttcaacggaaccttcagcgtggggccttacatctgtgaggccaccgtcaaagggaggacgttcaagaccagcgagtttaatgtttatgccttgaaagcaacgtcagaactgaatctggagatggacgcacgccagactgtgtataaggcaggagaaacgatcgtggtgacctgtgccgtctttaacaacgaggtcgttgacctgcagtggacttaccctggagaagtgagaaacaaaggtatcaccatgctggaggagatcaaactcccatccatcaaactggtgtacactttgaccgtccccaaggccacggtgaaggacagtggagagtatgaatgtgctgcccgtcaggccactaaagaggtcaaggaaatgaagagagtcaccatttctgtccacgagaaaggcttcgtcgagattgagcccacctttggccagctggaagctgtcaacttgcacgaagtcagagagttcgtggtggaggtgcaggcctacccgacgcccaggatatcgtggctgaaggacaacttgactctgatagagaatctcaccgagatcaccactgatgtacagaagagtcaggaaacaaggtatcagagcaaattaaagctgatccgggctaaggaagaagacagtggccattacaccattatagttcaaaatgaggatgacgtgaagagttacacgtttgagctgtcaaccctagttcctgcatccattttggatctcgtagatgaccaccatggctctggcgggggacagactgtgaggtgtacagccgaaggcacccctcttccagaaatcgactggatgatctgcaagcatattaagaaatgtaataatgacacttcgtggacagttttggccagcaatgtctcaaatattatcacagagctccctcgccgtggcaggagtaccgtggagggacgagtgtccttcgccaaagtggaagagaccatcgcagttcgatgcctggcaaagaacaacctcagcgttgtggcccgtgagctgaagctggtggctcccactctgcgatctgaactcacagtggcggccgcagtgttggtgctgttggtgattgtcattgtctctctcatcgtcctggtggtcatttggaagcagaaaccacggtatgaaattcgctggagggttatcgagtcaatcagccccgatggacatgagtatatctatgtggaccccatgcagttgccttacgactccagatgggaattcccgagagatggcctcgtgcttggtcggattttgggatccggtgcatttgggaaagtggtcgaaggtacagcttatggattaagccggtcccaacctgtaatgaaggtggctgtgaagatgctcaaacccacagccaggtctagtgaaaagcaggctctcatgtctgagctgaagataatgactcacctggggccacatttgaacattgtgaacttgctgggagcctgcaccaagtcaggtcccatttacatcatcacagaatactgcttctatggggatttggtcaactacttgcataagaacagagatagcttcatgagccaacacccagagaagccgaagaaagacctggacatctttggattgaatcctgcagacgagagcacaagaagttatgtgattttgtcttttgaaaataacggcgactacatggacatgaagcaagctgataccacacagtatgtccccatgcttgaaaggaaagaggtttctaaatactctgacatccagagatcgctgtacgatcggccagcctcctacaagaagaaatccatgctagactcagaagtcaaaaacctcctttcggacgatgactccgagggtctgactttgctggatctattgagcttcacctatcaagttgctcgaggaatggaatttttggcttcgaaaaattgtgtccaccgggacctggctgcccgcaacgtcctcctggcgcaaggaaaaattgtgaagatctgtgattttggcctggccagagacatcatgcacgattccaactacgtgtcaaaaggcagtactttcctgcctgtgaagtggatggcacccgagagcatcttcgacaacctctacaccacgctgagtgacgtctggtcctatggcattctgctctgggaaatcttttcccttggtggcacaccctatcctggcatgatggtcgattctactttctacaataagatcaagagtggataccggatggccaaacctgaccatgccaccagtgaagtctatgagatcatggtgcagtgctggaacagtgagcccgagaagagaccctccttctaccacctcagcgagatagtggagaacctgttgccgggacaatacaagaagagttatgaaaagattcacctggacttcctaaagagtgaccatccggccgtggcacgcatgcgggtggactctgataatgcgtacatcggtgtcacttacaaaaatgaagaggataagctgaaggactgggaaggtggcctggacgaacagagactgagcgctgacagtggctacatcatccccctgccagacattgaccctgttccagaggaggaagacctgggcaagaggaacagacacagctcacagacttcggaagagagtgccatcgagacaggttccagtagttccaccttcatcaagagagaggacgagaccatcgaggacatcgacatgatggatgacattggtatagattcctcggacctggtggaggacagcttcctgtaactgacacgctccgggtatcatcttctccgggagcctcctcgggataaccttaagaaaaccacttcattgcaatgcaaaagttgagaagaggacttgggtgatgtggagagagaaagttcccgaggccgagggccttggtaagcctgtgtggatgactgggatacttggattgaactttatccgtgttgcctcttgcaacgcgtcagtagcatctcagcggcgtgtgcggtttggaaatggatggacaagagagtgactggccacagaagacgggctttgtgtttccagggcatgggtgagagtcccacacgcgccaacttgtactgcagacaactccagcattgtaattatgtaaataactcttaaccgaggatgggtttagatctgtgttaactctcctctccggacctctgaagagaccactcagtccacccgtgtgcttccttccttcttggaatccggtaccagctgctgttgaattttctcatgaagtacatgcaaaaccactttgaactttggaaggtactggaaccgtcgtgttttactgtcttgtaagtgttaaagaggcaaaaagataaaaactaaccaaccgtgagtagtaggtttgggtcttttagggcacccaagaattcctctgtatcttgtaatctgtacttataacactactactgtttaacaagaatgctaaatatgtaatccgtaacatgatttctttacagagaaagcacaattaaaacaaaacccttactaagaaggtgacaagtttggcagtttttgacatttatattaagtaacacgtttctcaataaagtataataggtttagcggattaaagttagcaaacactagagagcagagtgtaagtagttatccagaaagtcaaacctttttgttttgttctaagcagtctccctaatccaaggcactaggaacagttaatgacctctgaagtactgggataagcaaagcagaaacccggtgggtgtcctaagtgttctcagtagaaaggcgtacgcctgagcccagtgtgactcctcacgctgtgtgcgaccttctggaagagactcattcacaaaaaggactcagatgggcagaatgtccatcagatgggactcagatgtctctcctgaccagtgatggcttggatggatcccgcccatacctacttttaaagtctgtgacttttaaggatgcttcaacatcagcaccttactttttctctcttgtctcagacgagaaagaactgcaaaccctgagaccacaatggtgctgttgaatgaaggctatgtgggcatcagcttggctcttcccttcccaccattaactacagctacagttactagcctcaatggtgtcagacctttgccccagagatttggaattacaaggtctgacgggagcaggaagctatatatatgaactgcctggtgctcttgaatagtcagtgttcagaaacactggcttgggttactgttgggggagggcaactttgaaatttggaacggggctagaagtcaaccatgcaggaaggctactgtttaagttcttggcttcatgtcaataacatgtcaatgccacgtatgcagctattcctacccttgatttaagtttccaggcttggctgaggctgagaaagcaaacatcttgacttgggaacatcttcccattctagtcaacgtgggtaccacttccccctggatgggagaacctgagcttgctcgcctcaaagtgtgtccgggaatgatgcaagtctgtgtgtcaggtctttgtgcaaccagctccatattcggtggagaagattaaaaaaaaagttttctgaatttggggcctttaggtggtaggctatcaggagcatccgaactgtcaaagtggttagtgtgagttcattggcattctctgccatgtgtctaattgctgactctgtatgaatgaaacatgggctatgattactgcaatcactgtattgcttctagcaggtgacgctttggaaggcacagaagcaataacaaggtacttgactacctactggcataatctcaatgcaaaccccaactttcccttttcacagtaagtgtgaagactgagccagattggccaattgaaaaacaaaaacctgactagagtctttcgagccaattagacttgaactacatccgtctttctagactcgtggctggagcagtctgtttaccactcatttgcacagcctctgtttgttgcttctttttattctgatgtcgctttgggccttgcatgacaccatgaagttggatgatacttctcagaccagcagtttcccatctttagctgtacccacctctgagattcaatgggaatacgttcacttttgttttttgagacagggtctttctacgcagccctggctgccctggaactcactgtgtaaaccaggctagccttgaactctcagagatccactgtctctgtacccccagtgctgggattacaggcatgcaccaccacactcagcagggatacatttttatttttaaacagtgttttgactgtatcctgatttgttttctttctggcctcctgcagagtccctggaagaaaatttaccaatctttcctgctttctatttttatgatgacaatcaaagcttgcccgaggaacacaatttgtgacttttaaaaaaatgatcaatgatgtccttaaaaaaatgtggtctgccaacctgtacaaaatggtcctatatttgtgaagagggacgtaagataaaacgatgttatacatcgatatgtatatatctgttgctatgtagacttggagaatactgccaaaatgtgtatgacaagctgtatcactgcctttgtttatattttttttaactgtgatattccccacaggcacgttaactgttgcacttttgaatgtccaaaatttatattttagaagtaataaagagaaaaatactgacatgttcccaacatggtggtgtggtaagtgtgtgagagcgacttactccataggaagggtcttccaatacaagatggcttccagatacccctgttcatgttttgttttaaaaagtgtaaatggagatctttatatttcaataaatgatttattatatatgacttaacgtta

SEQ ID NO: 1430 - protein, 1083 aa, Mus musculus
MGTSHQVFLVLSCLLTGPGLISCQLLLPSILPNENEKIVQLNSSFSLRCVGESEVSWQHPMSEEDDPNVEIRSEENNSGLFVTVLEVVNASAAHTGWYTCYYNHTQTDESEIEGRHIYIYVPDPDMAFVPLGMTDSLVIVEEDDSAIIPCRTTDPETQVTLHNNGRLVPASYDSRQGFNGTFSVGPYICEATVKGRTFKTSEFNVYALKATSELNLEMDARQTVYKAGETIVVTCAVFNNEVVDLQWTYPGEVRNKGITMLEEIKLPSIKLVYTLTVPKATVKDSGEYECAARQATKEVKEMKRVTISVHEKGFVEIEPTFGQLEAVNLHEVREFVVEVQAYPTPRISWLKDNLTLIENLTEITTDVQKSQETRYQSKLKLIRAKEEDSGHYTIIVQNEDDVKSYTFELSTLVPASILDLVDDHHGSGGGQTVRCTAEGTPLPEIDWMICKHIKKCNNDTSWTVLNVSNIITELPRRGRSTVEGRVSFAKVEETIAVRCLAKNNLSVVARELKLVAPTLRSELTVAAAVLVLLVIVIVSLIVLVVIWKQKPRYEIRWRVIESISPDGHEYIYVDPMQLPYDSRWEFPRDGLVLGRILGSGAFGKVVEGTAYGLSRSQPVMKVAVKMLKPTARSSEKQALMSELKIMTHLGPHLNIVNLLGACTKSGPIYIITEYCFYGDLVNYLHKNRDSFMSQHPEKPKKDLDIFQPADESTRSYVILSFENNGDYMDMKQADTTQYVPMLERKEVSKYSDIQRSLYDRPASYKKKSMLDSEVKNLLSDDDSEGLTLLDLLSFTYQVRMEFLASKNCVHRDLAARNVLLAQGKIVKICDFGLARDIMHDSNYVSKGSTFLPVKWMAPESIFDNLYTTLSDVWSYGILLWEIFSLGGTPYPGMMVDSTFYNKIKSGYRMAKPDHATSEVYEIMVQCWNSEPEKRPSFYHLSEIVENLLPGQYKKSYEKIHLDFLKSDHPAVARMRVDSDNAYIGVTYKNEEDKLKDWEGGLDEQRLSADSGYIIPLPDIDPVPEEEDLGKRNRHSSQTSEESAIETGSSSSTFIKREDETIEDIDMMDDIGIDSSDLVEDSFL

SEQ ID NO: 1431 - DNA, 89210 bp, Homo sapiens
ctggtataagaggtgctgaataaatatttgtcaactgatacaatctaggggggtaaatgctgaggagacagacagcagaggagagctggtgctgttttttttttttttttttttgagacagggtctcactctgtcacccaggctgaagtgcagtggtgccatctcggctcattgcaacctccacttcccaggctcaagcgattctcctgcctcaggctcccaaacagctgggattgcaggaggtcaccaccacacctggctaatttttgtatttttagtagagacggagtttcaccatgttggtcaggctggtctcgaactcctgacctcaggtaatccacccgcctcagcctcccaaagtgctaggattacaggcgtgagctaccgtgcctggcctgattcttatcttagggctgtgagggaacccttcattcagattataagcagaaaaaaatacctgattaaagactcaggaatagtgaggtgaagggctgagattagcacccaggtggccagtgcacatctgtaaccacagtgcagcgaagaggagagaagcccagaattcccccactcagatcccaagtcaagcaggaatcaccatctcctggctcgtggagctacatttctttgtcaacggcctgatggaaactggcctaagctctgggggatggtttaccagcaggactgtcctattatcttaatatgtgtgggatgtttaccttaacaaaggcattttttttttaaacaggctggagtgcagtgacatgatctcagctcactgcaacctcagcctcccagactcaagagatcctcctgcctcagcttcccgagtagcagagatggcaggtacatgccaccacacctagctaatttctctacttgtaggtgaaatggggtttcaccatgttggccagggtggtcttgaactcctgacctcaagtgatccaccctccttggcctcctaaagtactgggattacaggtgtgagccaccatgcttggcctctaaaggcatatttttaaagcactgaaaattaaacaataacaaaatacctggaagctctggaggcaacaaagacagaaggccaaaagtgtgcagactgtaagaatagaatacagagtaagggtaagactataaagaggaatgaaaatatgaggccaggagaaaagatacggaaaagagaacgaatgtgttccttcttgtgtgtccttcagctttccttctgtatcactgactatccaaagaaaaatttagttaaacaggcagcaagtatgaattgaatgctgggaaagacacacatacatttaaaatcccacaggaaagttataaatgtgagtaggtcagcagagaggcacccagccttggtaggcctcctgggatgttatgtagctgggtgtgtgttttcagccctgctataccccagatttcatttttgagtgagggtgattgcatttggagttagaatgagtaaaccatttttgactttattagttaggattgttaaggttggctgtaagtaatagaaaaaaaaaatcaaaataagtggcttaacaagagagagagaaggtagaattttaggccaggcactggcctaaatttgtggctcgcacctgtaatccaagcactttgggaggccaatgcaggagcccaggaggttgaggctgcagtgaaccatgatttcaccaaggcactccagcctggacaacagagtgaaacccggtctcaaaaaaaaaaaaaaaaaagaggccaggtgcagtggctcacgcctgtaatcccagcactttggaaggccgaggcgggtggatcacctgaggttgggtgttcgagaccagcctgaccaacgtggagaaatcccgtctctactaaaaatacaaaaaaattagctgggcgtggtggtgcatgcctgtaatcccagctactcgggaggctgaggcaggagaattgcttgaacctgggaggcggaggttgcagcgagccgagattgcgccattgcactccagcttgggtgacaagagcgaaactccatctcaaaaaaaaaaaagagagacaattttctctctgctggcatggccgactcatgagggcatctcagaaagacaagaagcccaagaggtcaacctggaagtttaatttggaccttactcatccagcagaagatggaatttttgattctggaaattttgaacaatttctacgggagaaggctggatatctcgggaatgttgttcacattgaacgcttcaagaataaaatcacagttctttctgagaaacagttctctaaaaggtatttgaaataccttaccaagaaataccttaagaagagcagtcttcatgattggcttcgagtggttgcatctgacaggagacttacaaactttgttacttccagattagtcaagaagatgaagcagagtcggaggactaggcaaaggcttcccttatagggctttgctgattaataaaataaatgaagtatatgtgagaaataccaagaaattggcttttagtttatcagtgaattttaaaaaatgcacccttaaaaaaaagagagacaattttatttctgttacattttcaagaaggcaggaggtagcttatcaaggtttgtttggggcttaagggtgagggatcttctacttggtagtaccacagtgctcagtttcccttttcaaggtggcctcatagtctaaattggctgctgaggccccactcacacacctgctttctactcagcaagaagaccagactgagaaggatgcatcctttttttaaagacgctttttagcagttgcacccacaactcgtgcttacatcttgttggccagaacttttcttcatgacacatcgacctgcaaaaaagttggtgaaaggaagacttctgttccggggggaaaaaaaacaaactaaaattaaaaatcaaggactctattactgagaaggaaaggagaatgattactggaggccaatatgcaatatgcaatctacttcactggaattgaacatatatttttttgttcctgaaaatgagtcctgcctcagtctctccagggcatggtgaggggtgggagtggtagctggtagaaagctagtgtccttaagacaaggattggctttaatcctgctttgggtctttgggtgatttgaaatccaaatgtggatacaaatgtctactttttttgtttgtttgattttgagacagggtctcactctgtcacccaggctggagtgcagtggcatgatctcggcttactgcagccttgacctcctgggcttgggtgattcttccacctcagcctccccgagtagttgagactacaggtgcctgccaccacgcccagctaatgttttgtatttttagtagagatggggttccactatgtcacccaggctggtcttgaacacctgaactcaaggaatccacccgcctcagcctcccagagtgctgggattactggcatgagacactgcacctggccacaaaagtctatttaagagtacaaatgagggaaaaataatctagttttgccaattatattatcactaaagctcttacgttgttgtaaaaagtcaccagacatattgtataatgtcacatccgtctttctttctttctctctctccttccttctttttttttttttttctttctttcctccctccctccttccctgcttccttccttccttccttctctctctctctctctctctctctttctctttagagacagggtcttactctgtcacccaggctggagtgcagtggtgtgatcatagctcactaaagccttgaactcctgggcttaagcctcctcccacttcagcttcccaaataatgttgaatttagatgataagtttacacaggtctttaaattcaaccaactctcatcctatggattcagagacaacagctgactatccaggagataaagattcctggctgttccttctcacaatcttctttgcttattggaaaatgctggagttaccccaaattctgtcctgtttctttttctttctctcattttaatccttcttgagctttttcaaatgtgtcatgtttaaaagtggactcatcctttcttttcttttttttttgttcttctttctttttttttgagatgaagtttcgctcttgttgcccaggctggagtgcaatggcgcgatcttggctcaccacaacctccctgtcctgggttcaagatattctcctgcctcagcctcccaagtagctgggattacaggctaccagctaattttgtatttttagtagagatggggtttctccatgttggtcaggctggtctccaactcctgacctcaagtgatccgcctgcctcagcctcccaaagcgctgggattacaggcatgagccaccatgcccggcccatcctttcctttctaacccagttcctggttgtccccctgctgagtagacagcaccagccatggcctcagccaggcaccccactctccctcacagttcacattttcagtgagtgctaggctttctacttccttctctctaattcactcttcattttctccaaactcctgctatcccccaggaacagggaagcatcctctcttgctagattatagcaggagcctccctatctcctgagatcatccaggctgatcttgctaaatgttcaactctgttcctgtcttgcccctctttaaaccatatacttccatagaattaagcccaggttcttttgtcaattgttttcctttttattaattaattaattttttttttgagattgaatcttgctctgttgcgcaggctggagtgcaatggcgtgatctcggctatccacaacctctgcctcctgggttcaagtgattctcctgcctcagcctcctgagtagctgggaccatgggcacacaccaccatgcctggctaatttttgtatttttagtaaagacggggtttcagtgttggccaggctggtcttgaactcctgacctcgtgatctccccacctcagcctcccaaagtgctgggattacaggtgtgagccactgcacccagccttattattttttagagatggtgtcttgctgtgtctcccaggctggagcgcagtggtgcgatcatagcttacctcagcctcgaactcttgggctcatgcattcctcctgcttcagcctcctgagtagctgggaatacaggtgtgcaccaccacatctggtcaatttttaaattttttgtagagatggagtctcactatgttgtccattctggttttgaacttctggcctggaaccttccatcgatcctcccatctctgcaagcctagacatttaacatggtctagaaggcctccatgagctccatctcacctcttttttgctccttccgctccggacctttacaagttgtggccattccaaactcctttcacttctgattatctcatgttctctctcacctccccgcccatgcaatgaggttcctccccaactagattcttattcctcttagattctcagagaagccttccctgaaagaagccgtctcccatctcccagattgggttaggctcctcctgtgtgctgacttcattgtctctctccaacattgcttagaacgctaagttgcaactttatgtctaattgattgctccactagtccataaaatctaggaggaaagggctgtatccttagcccttgacacatggccttgtacatcttaagtttgcatatgaaccgctttatttacctgggatattatcttacttaatccccaagacaaccctatacgttgtgcatgattattccaatggtcattactgttattttaaatagagatgggggctcactatgttgcccaggctggtcttaaactcctgggctcaggtgttcctcccaccttggcctcctaaagtgttaggattacaggcatcagccaccatgcctagtcgattatgccccttttaatggatgagcaaagagtcgaggttccactggttttccactgcagtgtctctgctgaaggattaaaaaaaaaaaaatcacagggctgtgctggactcctgggacttccagaggacaagtccctctcttcagtgaggctgacctacacagagccagccctccttcccctcccagccacagctgtgtgttggaaagctagaggcctgggcccctaataaagagcagacctcccaatctcctcgttccttccccctcccctcatatggtttttcaaattaaaagcaactaaaaccaaagacctaaggagcaggagagggcagaggcacaacaacatccctaaactgaggaagggggctctctagcgagggagggggtatccaaaagccagatccagagggttccagtcctaccagtctgtcccaggctctaaggagtgtatggcccaccgggctgggctggaccaggaaacaagctcttgtcctcaggtctgtaaacaggctgcgttgttaggaaccctctgcttctacttcctgaagagcaagccccccaaacccagaagagaggctgcaccttgagatccagccagcaaggtgggtgcggagtcctggggagggaactttcacctcaagctgcacagacccatctcgatctttttagagaattcctccttttccaggactagtgccgttctgaattctgagcgtgcaaagagactccttagagctagcttccgagcctcagctggggcagaccagaggccagggcgtctctctgtctgcggggaccccccacatctgtgcgtcacctccaccacctccgggcaaaggacccttcctcgctggacccagggaggcggctattccagatgcagccaagggttaaagggggtgggagaaggagcagttagcaccgttttcttttgcaaaccaccaaacgggcccttcattttcaaattgtgaagccagaaacatcccccgttcccttgccccgcccatcaccatttgaaaaaaagaattcacaagtttaaacgtgattttcacaactaacggctttgataactgttaaattcgtacggcttctagggcaaacggacctgaattcttcaaggaaagtagaattggcggtggagctggggggcagaggaggagaagacacaaaaagccaactcagtgggaagcgccctcaaagccaaaggtgtggcgctcggagctgtggccgccctcgcccgggagtcggggccaggagaacgggccctggaggcagggcagggcacggcgagattttgcttttgtttttagtgaccattttgatctggttgtaaaaagtttacgaggccttctttttgaaagtcagctaatcgactgcacctttttatacccttgccctcaatttcatgtcgcctgctggcctagacgcgcaaggcggaggacagaactgtcacagtccctacccttttctcccaacttctcggcccggctcaattcgggagttgggcctccttcctctcggctcgcagcctccccgactcccactttggggagaaaacccacattcttaaccccttgataatccctcaaggaaaaaacaaaacacccaaccccaagaggtgaaaattagaatccgggcgcgggttgagatcttgcgcaaaactggccaagcccagtgcatgtcgctcctctcctccgggtacataataggggggctggggcccttccccccccccccccacaaagggggcccagtggggaagcacaagaaagggggagaaaagacccgcacccccccctcaggagggcaaggtttctagccccctgcggctccgggaccacccaggacccggggcgtcgtgggaccgatctcgaaggatcttagaacgacactgggagagcgcggcaagaactagccccaccttcccccgacgccccggactgactgccgggcgcagacccgacttctcccgaaccagcctcggaccagccttagaaggcggaaaacaggattcaaacccgcctatgagcagtggtaggggcgggggctgtgggggcaggactcggcttaaggaaccaaccgcctcggttcgagggcctcctgtccggaggttgctcctgaccactgggtttattttgcttttgcagaggaggcagatgttgacctctcttctttgcacagtctctccgcaaaattttcccccaaccatttgctttcttgcgccaccccccaccggggcactatccctggagtcagctcctcaggcctttaaaccttccagaatgtcacacatggaaacctttagcaaatgtttgttaatgatcataacaaaggcatcattcaaattaggcaggtaattactaccagaaggacaactgggtgctcgcttgctcatccattgctttctgctttaaactcccgaggagtcgctgcctggagacactcccgcccggactgcttctcgggccccattaaacggctctgaaatgaactgtgaagttaccatttgtgggcggagagcgctggggccctgcggacggaagaccctggcttgaccggactaacagtgtcgccgaagcaaagcagcccctctgggtaggctgtctgtctcgcctcctaccctctggggcaactagcctaaaaacccggttctcaacttaacagcatgtggcccagcacccgcttttgccttttattccgcactctgatttttggggggatcgtttgttcccgctcattttctacaaacattacggtatcctgttagcattccgaacaaggggctgttcatatatttgccttcaatgatttcctgaagggacatgtggaagtaatagcgagcggtgcagtcacccaagctgaagatgcacgagagcgggtcgcgtagaagaactgcggcaatgggacccccagcgcagccccaggcgccctgttttcgaggctgacatcccaagatcctgtcctggttaggcacagcaccgcgcccgttggagtacttctctgtgactctcccctgtccactgcactgtgtccaccctcctggtgaaggaggagacggctgttggacatgccagtcccaacctggccactttggccattttcagagtgcgtgtgttggggtggggttgagggagaaggatgaaggatgacccccaaccccaacaggagaattcaaaaatcagagagcgatgaaggtgaacgcgctcccctcccccgctgtcgctgggaagccccactctgcccaggtctggttcctggagcatcagcgccccctttccctcgccggcaggatcgtttcctcccgacactggcctctcgccttgggcgcagggtttggggctcagctgtcaattccaaggaattcgtagggttcgacccacgcggcgggagggaacggagggagaatcaaaaggcatcctcccccacgacgcggaggcggtggtacgattcctcaaacgcccaagcttgagctttttttgtatgcgagatagaagccagggcaacctcgcccagataaccccgaaaacaaaggcacgaccagataagtgacttcaagggagtaaaggtcgttctatcggagaacgttccaaacctacacagaccctcttttctttgtaccgtatttcagaccacccagtcttgtacacacacacacaccacacaaaacaaaaacccatcattgtcatattggactcaacagtttgcccaatcctattaaataactagcaactatatagcccttcccctaaaagacccctagttcaaaacggcgcaaccgcttggagatttctcccgagggccctatttctcgttgggccgagtttgtagaagggacatttcttgattctagatttatattctctctgggtattaaatgcaattttgtatgttccttttcttcttttcaaagagaatacaaaactatagcagtctaagaaaataaccccaaaatggggaggcaaactcattctggaaatgatgggctgtttgtagtttcacaaaacctctttcccggcagagcaccaacacctcccccttccaccaccccccatcccatctggtctgcttctccccgccccccagttgttgtcgaagtctgggggttgggactggaccccctgattgcgtaagagcaaaaagcgaaggcgcaatctggacactgggagattcggagcgcagggagtttgagagaaacttttattttgaagagaccaaggttgagggggggcttatttcctgacagctatttacttagagcaaatgattagttttagaaggatggactataacattgaatcaattacaaaacgcggtttttgagcccattactgttggagctacagggagagaaacagaggaggagactgcaagagatcattggaggccgtgggcacgctctttactccatgtgtgggacattcattgcggaataacatcggaggagaaggtaagggaaaagaaaaaatgattttttgtttataagggaagtccctgatcagactctgggactggagaaagcgaagtaacttcaaactttgggcgacaagaaaaaaaaaaaggagctggattccagttgtgtgtccagagagtaatttttttttttcggaataaacttcacttggggacgggtgggagataaccatagagttagaaagtctaggtattttttttaaacacacattttccagacctatttttaaaaacaatgtttttctaacaaccctatggcctcccaaagaaattgtttaggcttacatttttgaggtttcttttgggagtgggggtggtgttcgtgaatactgggccgaacaccaaggaactgggggtggaggcagaggtgtttgccctcttcttggcagtgggtcctggaaggcgacaggttttaaatgagtgttttcattcctcgcctgcggtttggcgggacagcgctgcagcccatggtgtggagcgcggctgggggaccagggggaggtggggagaggggagcgtggaggggagcgtggaggggggcgcgcgaaggggttgcggggcgcaggaggcgggctgggctcggctggagaccggacctcggtgttggcctacagcacagggagccggccgaatgcgcgtgattactggacggcgctgctctgggagagagtcggggccagatttggcgcggcggtgaggcggctgcgggacaagcagaggcgcgcgggcgtgggcaagggtttggggcgctctggagcggtttgttgggtcagtgaggtgccagggagagcgggtgcctgccgggcagtgtgctcgggttgcacgccctagcgcgggggcgacagcggcggcgcgggcgggcggtctggaataatgacaaacacatttggccctgagtgaagaagtcgtcgtcgcctcgcattccagcaactgggatttgaggaatttcgaaccgcacaccaaggggccctcattgtgctccgtggcccccgcccccgcctgtcttcccgcgccccctcctcggtggaatcatttctgcattgcccgggggctctgctttcgctcagttctggccgcaggcaggaagagaggaaaggtctccaggaaggtgccgaacttcttgtgaggaagttagggacgacttggaactggggaaacttgtttgcaggtaagacagaaaggtgggaggtaaaccatattctccctccgggcacccgagccctggacaccccctacccggcacccttctccgcgcgggggtgcgtggcacttgccgtctgagctcgcccagcgctgctcggtcctctctagttggccttttttccattcctctccctgccggcttcagagccgtctgtgcgtacttctccttcctctgctgtctacccccatggaaaccagatttacacacgaaattaactccgcccggctgcgcccagggagcgggcggcgtccatttggcattgaatatgtgggatcagctgttctattccgggagggtgtcggccaggtcggagcgacgagtgtggcccaacccgagtacgttgccagagggagccaggagcctgggccgggccaggtgtgcgagagctgccgatggcctggcctcgcgtcttggtcgggaaggacttgctggcctggcaggctgtgcgttgtgcatccctcccgcagccagagcgccggtcccgcacttcgctccccgaattgtgctaagacctcaggatgtgcgcaaggagtgcctggaagaacttgccactcactccatcttcctgggtgggaggcaagcatggatggggcccatatcaggtccctaccgccccgcgtccgaaaagccgcgggctgggcggtgtgggaaatggctttttggctccgaggccaaattgctcaatgttttggaccgactcgcctcgccgcggtcgctcctgacaagaactagacagatttttggagcagggagcatccagggcaaacgcacgacagtcctccgcagtgcatctcaccggacaaacatccccggagccacaggaggggaggaaggggctctccgggcgtgcgcacctccccagccgccgcgctgtcccatccccgacccctaatctggtcaacctggaccccggcactgctgaattgcatcccctcttctccctttctcctcggcctcctcctttccacaaccctcaagatgaggaggccctgcctcgactccccgacaggcgcaaggccgaccaggctcgctttgacgccctggtcaggccctgcttcggagcttgcagttttgggttgacccaagtgcagctggacctcgttcacaagagtgaggggaagccaagaatgaacccgtcgttagcccccggtgccctggctcttgtttaaatccttagatcgagaaggacttgaaggagatcccaggctcccagctctgcgcccctgggccagtttcctctcgggacgcggactgaggagggatgcagggggaggggcattgggccgggctttccagctgcaaacacgtctggcgccgaggcgggcccattttgtgcctcctggggacggaccgtgggcggcgcgcagcggcgggacgcgttttggggacgtggtggccagcgccttcctgcagaccccacagggaagtactccctttgacctccggggagctgcgaccaggttatacgttgctggtggaaaagtgacaattctaggaaaagagctaaaagccggatcggtgaccgaaaggtgtgggtctcagggttccccgggtctaactcgccgggtccaaccgcagcatcagccttggggcggcagataatctttcggtctcgcctggggcgcaagatgcaggatcgggggcaaatggcttctcccaacttccccctaattcgggttctgccagatggttgtcgtttgctgaagtggctcggcggcatttccttttgttttaaactgatcaatgagcgaacctgggatgggctgaaaaagtagattgtaggagggaataatgggaaacccgacttggggcgcctccttccctgcctcctactgcagtttctcggcccccgcgaaaggggagcgacaagcgcgggtgggcgcggactcttgagggggcagaggcggctatggcgcgtgtcgggcaaggtggcaccagaaggcacttttgtgtgtgtgtgtgacaagagtctcgctctgtcgcccaggctgaagtgcagtggtgcgatctcggctcactgcaacctctgcctcccaggttcaagcgattctcctgcctcagcctcccgagtaactgggattacaggtgcccgccaccacgccaggctaatttttgtatttttagtagagacggggtttcaccatattggccatgctggtctcgaactcctgacctcaggtgatccgcccacctcggcctcccaaagtgctgggatttacaggcgtaagccaccgcgcccggccaggaacggttcttaaatgccgagagggcgcatgctagctctcctcagcattcccggtgagccgctacccacggccgtgcggctctcgtgcccataggaggcgctggcgagctcctgtaaccctaaacccctcggcccctttccccccacccgcccggattctcttcccgctctcccccctctctccacacccgcccggccccctctcgggtctcagttgaaaacaatgcaaacgcagagcgtcgtgcctggggcgcagcggcctctgcagctctgaggttcagagcgcggcgcgcaggggcgcaggggcgcaggtccccggagcggctgggcatcgccgccaaccccgggacaaccaagccgccgaggacttggtggaggtgggagggagagcggaccgcgcagtgttcctctgggtcccggggtcagaagccggacagtggcgggggctggacagtccgagcgcagagcctcccgggcgaagtctgcgcgcagcactcccggctgcgctgtcggggaccaggagcctgggctgcgggcgagctagctggcgagccgggtaagattcgcggggctgtcgcgccctctagtgggctccggggacgcatcccgctttccccagccccgggcggtcggcgccgctatctcagtggagcgcagcgctggaaccccgggggcccggagcggaggctaatctgggtcacctttcccctcctccgggcagccagtggactcctcgcaggctctgtgtgggcccgggaggcgccgggtggacgagagggggccgaggtctctgggtttggattgagaatgggacgtccttgtaattcaatgtgggagaagcaggggagtgtggaggaggacgggtcccgtgcgttcttggggggcaggcgccgtcttctgcgttccagcccctcgccagctcccttgccccgcgggcggcctgttgctgtttgtttgttttacgaccctgcgttattgtgcaacggtaacagtcgtttccaatcagctgcgcggccgtcgcggccctcgccaggctggtttatgggggcggcggtggcgcgcggacagataggacagcgcggcccgggaacggcgtcgaggtccaggcggtccccctgccccgagggggcggaaatgctgaggtggcgagagcgtgggttgcacagaaccctagtagcgagtccggctgagcctctgcggcctagcccagcagcgtcgtcttcccggctccgaagacgtcttcccgaagccccgctgccccggcgcaccagctcccggtgatggggatgatgatggggatgatggggagatgtccccgaattctcctggggtcccgaggagatttagccattttcaacagcagttttcctatttctgcttaaaccccgcgggctttcaactgaggtcaccacgaaagctaaaagtacaacctaaggaaggaagagactggaaattaacatttggggtagtggagctcagaattcctcgcagcggcgtctgtgtcgcaacccgtggacgcacgtccttggaccaacactgccatctgctggccactcgtaagaactactgcgacccgctgtgagaatgggcttcgcggagaccattaggaaggtgctttattttttattttttatttattttttgctcagtaggaccgtaataggtgactgattttcttttgctgtgaggctacaagaattgctggaagacaacatttttatttcgtggaaatttgtgttgtgtttctccttggttgttaatgctttgcatttacatagtgaacatcttattatcagagctggcctgtgaggagggtagtgggggggcattgatgttcccgtttctgagtgaggagacctatgtcggggccttggtgacctcaagccgaatgctcaaactgctactgctactcctaaggttgtgccattaggagtcacacccgtttggtgatattcaaaaggatatgtcattttattctcccgtggttaaatatatggtgagaggagagcaggcatgtttatgagcccagattgtcccataaaaggctcctgtttaaaaacactccagccccctcccattactggaatgtctgatggagctccgggagatcaaaacaacaaaacaggctctggtagggtgcagaggtcctggtaaacacaccctctgctggaaaacagggagaagtttccaccagtgtagacctgcacttggtttgcctgggctgaagttaggagactgcgtagaaaaaggaaaatgtgtaattttcacagttagaattaacttaggagagctgaaattaactgagcctcggaaatctgaatcttgaagtcaccagtggcttttggggctgtgagagagtctcctgtggtctttaatcatgtgagggtggggtgaaattcaatattcagtggttctgcaatgggatgcactgtgcaattggtgattgagaagccaactctctggctttaggagaagaatgtcttgctgttagtccttctggaaatagagccttgcattgcctactgtctgtttacactacctttgcacattgcctttggttatagagtcatgtccaatggctctttacttctgtttgcagggcaggagatggcaccctgttaaagagaaaggatagtagctgcaaagtcatttgtttctctgtttctgtgactgtatatattggctcatctttgaatggtctttatagccacaccaggctggaggtaacagggtcatgggagtggactgctggtgtgggctgaatcagagttcagatccatgtctccaggaggtaggaggtgcagggcaagtcatgtggcttctggggcatccctcactttcttagttaaggagaagttgaaggagccgatctaaaatatcttgggagtctgcagaaaaagtcgtgaaaatcaaagcactttcaattaaactatataatttagtccttacaagaatgccacagggcaagcaaccagtcaggccttggtagtcgtgcttcctagaagaaaagactgaggttcagagagttggatagagtatcagatttgggatcagtggctagtccaatgtgatttccatcctttcttctgagagaaagcataagaaggccaagaggatggtggaaaagcacaagtcacctgcctgagagtcaacagggcggggggtctctttctcagtttgttcctctaagttatggcaaatgttttttgagctgtgattattgagaatgggggctgaagttcaacatgtagttggcatgagggaagtaattatgattgaagaaaagatttgggtgaaatctagtgttcttccctgcaaagggggttgttctcacggattcttatggtgccatgtttctcagaatttgtagtttcagttacttatatttgcacacctgactttagatgagctccagaatagcagttactaattaaggatgagcatttagagtagataaaagtggcaggaacagcaagactcactcccagagagcctcactacaggtctaataggtgaggaaattccccatgtttcccatttttcttcattacctccctgtggggcaagcactgccattattcatgagtaaactgtctgagttatagataagtaatgacatgaaacttcacaaacacgctgagcacagtggctcacgcctgtaatcccagcactttgggaagccgacgtgggtgaatcacgaggtcaggagttcgagatcagcctgaccaacatggtgaaaccctgtctgtactaaaaatacaagaaattagctggccatgatggtgggcacctgtaataccagctactcgggaggctgagacaggagaatcgcttgaacttgggaggcagaggttgcaatgagctgagatcatgccactgcactccagcccaggcggcagtgcaagactccatctaaaaaaagaaaaagaaagaaagaaaaaagaaaaaaagaaagttcacaaacaggcctgatttctacccagggaaccactgttatcagagattggggtttggaatcttaagcaacaaacacatgtttattctcttccttcctgatggcttgctcagaggacctgtttccattgcccactttttttttgagacagaatcttgctctgtcacccaggctggagtgcagtggcgagatcctggctcactgcaacctctgcctactgggttgaagccattctcctgcctcagcctcccgagtagctgggattataggtacctgccgccatgcctggctaattttttgtatttttagtagagatggggtttcatcatgtcggccaggatggtcttgaactcctgacctcaagtgatctgcccacctcagccttccaaagtgttgggattacagatgtgagccaccacgcccggcctcattggccactttatatgtcagtaaataatctttcctggcagagggtccactgtatctggaggcactgaaggaaatctgggagtgtctggccagggcaaagcactgcttagagcttgcacaggaaaagcagtgagcccttcttttaagctggagaaagctttaaagatgcatctttggcaagtcttgccaaagaaatatgggttctaaatgtgataaaaccaaagacatcaagctggctctggaggccttgtttgaagtttgctgagtggattgtcagtgggaggctgatatttatatgtacaaacacacaagcattactgctaattgtggtaaatcaggctggccagcctggctctggggcccactgtgcctgccaccgcagcagtgtggaagccttgcatcccaggcacatgtcaggatcctcggaggccatcagccagccagcattgtgtgaattgcatttgggttcacagcactgtaattgtgtttctcctgctgtggtgagcaaaggaggaaaatggaaggaggaggtataatttgccctaggaaatagtcaggcaagtaggtggcacacaggggtgggatatggctaaaacactgaccttcccttgagagagaccatatggtgaagtggagagggcatggcgtttgtatcacacgaccttgtgttcaaatcctggctctgtcactggctgtgtgactttgggtcatttgcaaaacctctctgagcctcaactgccacttcttaaaatcagctctaagtaatcacagggttattcttcacaaacacagcatgcacatgcaaactttggcttagtaaataatggtttctccttctcttactttgttttctacataccccactccccttcctgtgaggagccttccacctttttctctgtgttctcttcctctcccattttcctggtagcattcaataaaacagaaatctgatttctgcaaagtaggccaccttacggtagaaatacatgattaggccccaccaaaaactttgattaggctattatcttctggatcctggatcccctccaaccaaaccaaacccaactagggctaaacacagcaatatatgaatacattgaatttctctctcactctttcttttttttaaaccagtttactcaggaatcacatgcacacatattttagcttccaaagccaatgatggaacaaattgtgtcccattaggctcactccattgtatgagttagcatcagaggagttcataccagagtgacttcatcttgaatagggcctaggtaagaagaggatgagacctgctgggctgcattcccaggaggttacacatttgtagtcacaggagagaaaggagttggtataggagttgatagatacaggtcataaagaccccagtgataaaacaggttgcaggccaggtttggtggctcattcctgtaatcatagtactttgggaggccaaggcaggaagattgcttgagcccaggatttcaagatgagcctggacaacatagtgagaccttgtctctacaaacaataattttaaaaacatgagctgggcatgatggtgcaggcctatagtcccagctactggtctgaggggcagttgggtggcaggctgagatgggaggatggaggctgcggtgagctgagatcaggccactgcactccagcctgggtgatggaataagaccctgtctcaaaaatagataaataaataaataaataagccagcaaaaccagaatgcagtgaagaagctggccaaaacccaccaaaacgaagatggtgatgaaagtgacctctggtcatccctactgcttattacacactaattataatgcattagcatgttaaaagacactcccaccagtgccatggcagtttacaaatgccatagcaatgaccagagatactctatatggtctaaaaaggggaggaaccctcagtcctgggaattacctgtccctttcagggaaaactcatgaatcttctaccgcttgttgagcgtataatcaagaaataactataggtatactcactcaagcagccatgcagttgctgtgcccatggagtagccactcttttattcttttactttcttaatatatttgctgtcattttactcttttggcttgctcttgaattccttcctgcatgaagccaagaacctttgtgacctcccaggctgaaccccaattttgagttccaccctatgacatcttttctggtgaccaatgaagggacaatggtaacctcccgttgactttaaattaaaactgattggcactgtttgggcttcaccggtgggtgagtctctccttgcccagattcaacttgctaacatttttttctcttcaattttggctcctttgtccttcctaatgttcttcattttggacagatgggaaagtggctgtgaggcctctggcttagcagcctgatagcagcctcctgttgtctgggtgccccagatgggagcacgcctggctggccacatcttttgcaacccaccttgtcatcccttctctgggaccttttctctttagtttcttttttaaaaaaaattttaaattatttatttatttatttatttttagagatagcatctcgctgtgttgcccaggctggagtgcagtggcataatcatggctcactgaagcctggacctcactggctcaagtgatccttccacctcagcctcctgagtagctgggactataggcatgcaccaccacgcctggctaaattttgtattttttttgtagagacggggttttgccatgctgcctagactggtcttgaactcctgggctcaaatgatctgcctgcctcagcttcccaaggtactgggattataggtgtgagccactgcacctggcctctctttagtttttaatgactggctgtttgacttctctgctcttcaggctgaaattcttatttcatgtttgtagtctttgccttggctatttggcaactgtttaaggcaagacacttggttttgagagttctcccgttgtgttgaccctgggacaccagggtcattgttctgtagctccaattatgttaggtctcatgcttttgggtttcactattggccaccccccagatgctctggggtttttggcatttggtgtggggacccttgttagctgatactctgggcttttcggcatttggatgctccagggtgtttggcactgacattcccctctagcattgtgggttagagtcccacccaggggaaatcttggttttgccttttcttgttttctactctaaagttatcattttctataaaaacattttcttttcttattgtcactttgtttaatgctttgctccaggaggtgggaatttgcaggggaaaataattgggctctccctatacttagaaaaacttctgtgtctagtagagatccttgttagacaaagggacagtggtgagtcccagagaactcgtcactagggtgccttttaggcaattggagcaaattcaaattagcaaactaagtttggccatttggataagtcccagttttgtcagggaaataatttgggtccagctatcttttataaaatagtgcgtttgcgttcctacattatggctagagctcaaagataaaagctattggatctttgtttatgtgtgtgtataaatgtctagatgtgtttatgtgtatgtacatttattatgttatatattgtatctacagggtaccaaattggcttataaataaaagagtgctcataaaaagagtaaataagtccaagcatttctcaagctcatgtaacttaagtttactaaaatttagagttactaaaaattcatatataactctgtataaatgtgccaaagaagatatgctcttagtgaaaataaattctttttggccaattcagatgtcatttatatgtggggtttaaaatatgaatttcgaaagaaaataaaaacaagtagaaagaaataaaaaacaataagcagtggagagagatgtgaggaaagttatgaatatgaagacgtatttttggtaaggaatgttataaagaaattttatgagaaaggatcttatatgataaattcttgtcctaaggtagaatgactgattgtttagaaaagaaggaaatataggacaagtcagaaagtccaagcatgttgtagatgacctatgtaagtcacgataaagtttatacaagagaatttattaaaatttagatgtaattagccataactgaaaggaaatttatttatttatttatttatttatttatttatttatttatgatttattttgagaaggagttttgctcttgttgcccaggctggagtgcaatgtcatgatcttggttcactgcagcctccgcatcctgggttcaggcatttctcctgtctcagcctcctgagtagctaggattacaggcatgcaccaccacacctggctaattttgtatttttagtagagatggggtttcatcatgtttgtcaggctggtctcaaactcctgacctcagttgatccacccaccttggcctcccaaggtgctgggattacaggcatgagccacctcatgcacccagccaggaaatttatatataatactctatctaaattttggtgccctatgttaaaacaagtttttcttcaagtattggtttgctttcagtaagattgcaagaaatattgacttttaattctagaatctgtttcctttgaaggcctctcagatttatatcttttccttttcccttgaaaaggtatagcctttgcaagttcaaaactgacttccctagactccttttaggaaaagcaatacagtggttgtttcaggctgtggctcaatagctaagcctttgttctttcatggtggtggcctgggttcagttcctggcttagagaatgagaggtttccagtttgctacttctgggacttttgtcatttatttattctttttgtctccatcgacagcttctgattttctcacttgaatttttttttctgtgagctaccttaagggtaatgttggatcttgtaaaaattgcttgccatctctttggagatacctcttgtgtccatggttaagttataaccttggttaaggcctgttggtttcactagggaaaatacctttaaaaaaaggcttaaaagccagagatgttggctatttgtcctggctagagtctggtattaagggatttaaaaggattttttaaaggacctctatagttataagtcagcttaattaaaaatggatattccatagtcatatttatatatatatacacacacatatatatgtatgtatgtgtgtatatatatatatttaaaagacctgtatgatttttttcttcttggaacttatttttttgagagaaagtgttttgtgtgtttgttgtttgtttttcttctcagtggactgaattatttctccattctgtctttttaccccctttaatgaccatattagaggacctaagataatttctgacagcctgggactccttgggaggaaacagaaggtgccacagacctcgttttgggagaaacctctgttttcctcatggaaccccaagagctgtaagcagagagttctccctcagaatccaaggctctgctctgtttacgtcacattacctgacctttgtgacttttgggggcatcagaaattactttgcattatgagggaacctttagcattggtgtgtattacctaggtaggatgtgtacttttagggattgcagttgcttacatgagtggttattactacagaccaatacttctttcttctcacatttaaatgaaaaaaaagcatgctcttgggcatccacctatgaatggaggatgggctgatttgctttaggttggccaccagcctttggggaacatcgttgcagtgaaatgcttggtgaaagcattgcactgtctgatcgcatagtgcacttctatgcacttctgcctgatgtcctaggctcaacacctgctacataattaagatcacttacttatcaggtttttaatcaaaatgaaatgttgctaagagttaacattatagcatatgtaattgagattactggagaaagttttacctacaagatatgtaaggaaagcaaaatgtgtttttggtaaaagattataggaaggtgtgccagtatagttttttattttgcttactttaatgggttaaaggattgttttaagtttgataggagaaagctgaagcatgagcaagttgtggaaggtatatgaaagattaacattttaaaagaaattctgtgtgtaaacattggctaaagttaaaggaggaggttggagccaagatggctgaataggaacagctccggtctacagctcccagcatcagcgatgcagaagatgggtgatttctgcatttccatctgaggtatcaggttcctatcactagggagtgccagacagtgggcgcaggacagtgggtgcagcgcaccgtgcgcgaaccgaagcagggcaagccattgcctcactcggaaagtgcaaggagtcagggagttccctttcctagtcaaagaaaggggtgacagacggcacctggaaaatcgggtcactcccaccccaatactgcgcttttccgacgggcttaaaaaaaggcacaccaggagattatatcccgcacatggctcagagggtcctacgcccacagagtctcgctgattgctagcacagcagcctgagatcaaactgcaaggcagcagcgaggctgggggaggggtgcccaccattgcccaggcttgcttaggtaaacaaagcggctgggaagctcgaacagggtggagcccaccacagctcaaggaggcctgcctgcctctgtaggctccatctctgggggtagggcacagacaaacaaaaagacagcagtaacctctgcagacttaaatgtccctgtctgacagctttgaagagagcagtgattctcccagcacacagctggagatctgagaacgggcagactgcctcctcaagtgggtccctgacccctgacccctgagcagcctaactgggaggcaccccctagtaggggcagactgacacctcacacagccgggtactcctctgagacaaaacttccagaggaatgatcagacagcagcatttgcggttcacgaaaatctgctgttctgccgccactgctgctggtacccaggcaaacagggtctggagtggacctttagcaaactccaacagacctgcagctgaggatcctgtctgttagaaggaaaactaacaaacagaaaggacatccacaccaaaaacccatctgtacatcaccatcatcaaagaccgaaagtagataaaaccacaaagatggggaaaaaacagagcagaaaaactggaaactctgaaaagcagagcgcctctcctcctccagaggaacgcagctcctcaccagcaatggaacaaagctggacggagaatgactttgacgagttgagagaagaaggcttcagacgatcaaactactccgagctacaggaggaaattcaaaccaaaggcaaagaagttgaaaactttgaaaaaactttagacgaatctataactagaataaccaatacagagaagtgcttaaaggagcagatggagctgaaagccaaggctcaagaactacatgaagaatgcagaagccttaggagctgatgcgatcaactggaagaaagggtatcagtgatggaagatgaaatgaatgaaatgaaatgagaagggaagtttaaagaaaaaagaataaaaagaaacgaacaaagcctccaagaaatatgggactatgtgaaaagaccaaatctacgtctgattggtgtacctgaaagtgacggggagaatggaaccaagttggaaaacactctgcaggatattatccaggagaacctccccaatctagcaaggcaggccaacattcagattcaggaaatacagagaacgccacaaagatactcctcgagaagagcaactccaagacacataattgtcagattcaccaaagttgaaggaaaaaatgttaagggcagccagagagtaaggtcaggttacccacaaagggaagcccatcagactaacagtggatctctcagcagaaactctacaagccagaagagagtgggggccaatattcaacattcttaaagaaaagaattttcaacccagaatttcatatccagccaaactaagcttcataagtgaaggagaaataaaatactttacagacaagcaaatgctgagagattctgtcaccaccaggcctgccctaaaagagctcctgaaggaagcactaaacatggaaaggaacaaccggtaccagccactgcaaaatcatgccaaattgtaaagaccattgaggctaggaagaaactgcatcaactaacgagcaaaataaccagctaacatcataatgacaggatcaaattcacacataacaatattaactttaaatgtaaatggactaaatgcttcaatcaaaagacacagactggcaaattggataaagagtcaagacccatcagtgtgctgtattcaggaaacccatctcacgtgcagagacacacataggctcaaaataaaaggatggaggaagatctaccaagcaaatggaaaacaaaaaaaggcaggggttgcaatcctagtctctgataaaacagactttaaaccaacaaagatcaaaagagacaaagaaggccattacataatggtaaagggatcaattcaacaggaagagctaactatcctaaatatatatgcacccaacaatacaggagcacccagattcataaagcaagtcctgagtgacctacaaagagacttagactcccacacaataataattggagactttaacaccccactgtcaatattagacagatcaacgagacaaaaagttaacaaagatagccaggaattgaactcagctctgcaccaagcggacctaatagacatctacagaactctccaccccaaatcaacagaatatacatgtttttcagcaccacaccacacctatcccaaaattgaccacatagttggaagtaaagcactcctcagcaaatgtaaaagaacagaaattataacaaactgtctctcagaccacagtgcaatcaaaccagaactcaggattaagaaactcactgaaaactgctcaactacatggaaactgaacaacctgctcctgaatgactactgggtacataacgaaatgaaggcagaaataaagatgttctttgaaccgacgagaacaaagacacaacataccagaatctctgggacacattcaaagcagtgtgtagagggaaatttatagcactaaatgcccacaagagaaagcaggaaagatccaaaattgtcaccctaacatcacaattaaaagaactagaaaagcaagagcaaacacattcaaaagctagcagaaggcaagaaataactaaaatcagagcagaactgaaggaaatagagacacaaaaaacccttcaaaaaattaatgaatccaggagctggttttttgaaaggatcaacaaaattgatagactgctagcaagactaataaagaagaaaagagagaagaatcaaatagacgcaaaaaaaaaaatgataaaggggatatcaccaccgatcccacagaaatgcaaactaccatcagagaataccacaaacacctctatgcaaataaactagaaaatctagaagaagtggataaattcctcgacacatacaccctcccaagactaaaccaggaagaagttgattctctgaatagaccaataacaggctctgaaattgtggcaataatcagtagcttaccaaccaaaaagagtccaggaccagatggattcacagccgaattctaccagaggtacaaggaggaactggtaccattccttctgaaactattccaatcaatagaaaaagagggaatcctccctaactcattttatgagggcagcatcatcctgataccaaagccaggcagagacacaaccaaaaaagagaattttagaccaatatccttggtgaacattgatgcaaaaatcctcaataaaatactggcaaacagaatccagcagcacatcaaaaagcttatccaccatgatcaagttggcttcatgcctgggatgcaaggctggttcaatatacccaaatcaataaatgtaatccagcatgtaaacagaaccaaagacaaaaaccacatgattatctcaatagatgcagaaaaggcctttgacaaaattcaacaacccttcatgctaaaaactctcaataaattaggtatgtaaatgggacgtatctcaaaataataagagctatctatgacaaacccacagccaatatcatactgaatgggcaaaaactggaagcattccctttgaaaactggcacaagacagggatgcgctctctcaccactcctattcaacatagtgttggacgttctggccagggcaattaggcaggagaaggaaataaagagtattcagttaggaaaagaggaagtcaaattgtccctgtttgcggatgacatgattgtatatctagaaaaccccattgtctcagcccaaaatctcctgaagctgataagcaacttcagcaaagtctcaggatacaaaatcaatgtacaaaaatcacaagcattcttatacaccaataacagacaaacagccaaatcgtgagtgaactcccattcacaattgcttcaaagagaataaaatacctaggaatccaacttacaagggacgtgaaggacctcttcaagaactacaaaccactgctcaatgaaataaaagaggatacaaacaaatggaagaccattccatgctcatgtgtaggaagaatcaatatcatgaaaatggccatactgcctaaagtaatttatagattcaatgccatccccatcaagctaccaatgactttcttcacagaattggaaaaaactactttaaagttcatgtggaaccaaaaaagagcccgcatcgccaagtcagtcctaagccaaaagaacaaagctggaggcatcacgctacctgacttcaaactatactacaaagctacagtaaccaaaacagcatggtactggtaccaaaacagagatatagatcaatggaacagaacagaaccctcagaaataacgccgcatatctacaactatctgatctttgacaaacctgagaaaaacaagcaatggggaaaggattctttatttaataaatggtgctgggaaaactggctagccatatgtagaaagctgaaactggatcccttccttacaccttatacaaaaattaattcaagatggattaaagacttaaacgttagacctaaaaccataaaaaccctagaagaaaacctaggcattaccattcaggacatagggcatgggcaaggacttcatgtctaaaacaccaaaagcaatggcaacaaaagccaaaattgacaaatgggatctaattaaactaaagagcttctgcacagtgaaagaaactaccatcagagtgaataggcaacctacaaaatgggagaaaatttttgcaacctactcatctgacaaagggctaatatccagactctacaatgaactttaacaaatttacaggaaaaaaacaaacaaccccatcaaaaagtgggcaaaggacatgaacagacacttctcaaaagaagacatttaagcagccaaaaaaacacatgaaaaaatgctcaccatcactggccatcagagaaatgcaaatcaaaaccacaatgagatagcatctcacaccagttagaatggcaatcattaaaaagtcaggaaacaacaggtgctggagaggatgtggagaaataggaacacttttacactgttggtgtaaaagtgttggtgggactgtaaactagttcaacccttgtgggactgtaaactatttggttggtgggactgtaaactagttcaacccttgtggaagtcagtgtggtgattcctcagggatctagaactagaaataccatttgacccagcaatcccattactgggtatatacccgaaggattataaatcatgctgctataaagacacatgcacacgtatgtttattgcggcactattcacaatagcaaagacttggaaccaacccaaatatccaacgatgatagactggattaagaaaatgtggcacatatacaccatggaatagtatgcagccataaaaaatgatgagttcaggtcctttgtagggacatggatgaaattggaaatcatcattctcagtaaactatcgcaagaagaaaaaaccaaatgccgcatattctcactcataggtgggaattgaacaatgagaacaacacggacacaggaaggggaacatcacactctggggactgttgtggggtgggggtagtggggagggatacctttaggagatatacctcgtgctaaatgacgagttaatgggtgcagcacaccagcatggcacatgtatacatatgtaactaacctgcacattgtgcgcatgtaccctaaaacttaaagtataataataataaaataaaaaaatttttaaaaaataaagttaaagggatattattattattatttttgtaagttaaacattaggattaaaaagcacaacagagttttctagagcactgatctactctgtaacagaaaattgtaaagggtttaaaaggtttatgagaatcttaccttatggtcaaactggttaagattgggaagatttgtctataaagttttattaagaattgggtttgacattaatactacactaatgcaaacgtgaaatgtggctttctctcttgaataagattttcatgtattattacaagataatgaaagatttttatttgctttttaaataaactataggaaaaataagggagagaaaagtgacagatcatttggaaacccaagtctcccctatatcaatgagtaaaagtttttacctttttgaaatctttgagttatcattttggctaaataaatgctttatggtgacctgggattctattttgtaatatcaactgtttaaaccttttgtatttgacaaacgttccaaactgaaattctaatgtaagtctttttctgacctgattagtccttctagatattaggtcccctaaagtccaaaagtgacatatttggcttattagatatattaaaatcatacaggaagcactttcaaatataaaatgctatttggctttctttggactatacttatataaatgtgttattggtatatgttccaaaattatgcaaaactcctataattctgatatgacttagtgtacattatcagtcataattatagttcttatgttacattattgtgtgctacagagttaaccaaatttctttgtcaattgcatctttaatcagctgtcctaagacttttgtcacccacagacaattgtcttgttttaatccttttcaaaaggtggtttataatcagctataggactctgatgggtactctaaaatgcaagcctctgataactttgaaaattgtgccattggctgggcatgatggctcacaactgtaatcccagcactttgggaggctgaggcaggcagatcacgtggggtcaggagttcaagactagcttggccagcatggtgaaatgccatctctactaaaaatacaaaaatcagtcaggcatggtggcatgcacctgtaatcccagttactcgggaggctgaggcaggagaatcacttgaacctgggaggcagaggttgcagtgagctgagatcgcaccattgcattccagcctgggcaacaagagggaaactccgtctcaaaaaaaaaaaaaaaaaaaaattgaaaaagaatattgtgccattgaaacagaaaagaaaacacaaataaacttccaggattctcatagaaacttaatatattcataaggaatgtggcccaatatcaggcaaaacaagagttaacagcatggactaaactaataaaagaccaaaacaatcttttaatgactttttgcttaaaacattgcatatcctttctgttttgcttttcagagtcaagaaaacttttcctttggaaagtatttactgcttttaacaattgaaaaaagtatactactatggacaaaatttggagcatatgtctttctttttacctgatttctccagaatttgaaaactatttgggagtattcttaactaatagcaatatagttatttgcctaagtgcagtaagaatcttttcttttgtaataggacacaattaaagaaactgcttattttatgaaggctttgactagaatggtgtgctttcagatacaaacagactgctttaagggatcaaagttgacttatagagccaataaaagccactatggaaaactggccttattctttgtctatgcagtctctgtatggggttcctgacctgtggtaagtgaagaatgtcactttctgacaggcccaggagccccaagttatcttgggacatcaagaagaaaggaatgcacccaacttatacaggtatttgcaggcacagataaatctgtggctggctcaaggctttaagaagcctaatgtgagattctttttaaattaaatttccatcgaaaccaattttaacaagagcctatgtggcaaataattatttttgctgcactttatacaaataatcaggccaaatttcataagattaaaactttatggcaaacaaatttgtcccactatgatttgtctttggtaaaaatggaagctagagagagaatttgtttcaaaaactatgatacaccagttattagattctagtctcgtctgttgtttttgagtttcttctgcaatttaggcagaccctgcttattcctgagaatcaaccagtgatctatggctgttgctcagaagaaataagagggatggctaacgtaaagatctggattagtattctaattctaggcatgtattagaattggctagtgaccccatatcagcttggttttaacaattacccagttcatggaaagccttcttatttagtttacttgggataattgtgctgattttgttttactgttgtggaatatattgctgttgtcctctttgtgtaggaatgcaggaaaagcttacttaacattttcttaaattgaacacttattaatcttccagatttcaccttttgtcagaactcagagttatgatttgtcctcactgtactgacaacaggctctggtagggtgcagaggtcctggtaaacacaccctctgctggaaaacagggagaagtttccatcagtgtaagcctgcacttgggttgtctgggctgaagttaggagactgagtagaacatttgctgcagaaaaaaaagaagatgtgtaattttcacagttagaattaacttaggagagctgaaattaactgagcctcggaaatctgaatcttgaagtcaccagtggcttttgggactgtgagagagtctcttgtggtctttaatcatgtgagggtggggtgaaattcaatattcagtggttctgcaatgggatgcactgtgcaattggtgattgagaagccaactctctggctttaggagaagaatgtcttgctgttagtccttctggaaatagagccttgcattgcctactgtctgtttacactacctttgcacattgcctttggttatagagtcatgtccaatggctctttacttctgtttgcagggcaggagatggcaccctgttaaagagaaaggatagtagctgcaaagtcatttgtttctctgtttctgtgactgtatatattggctcatctttgaatggtctttatagccacaccaggctggaggtaacagggtcatgggagtggactgctggtgtgggctaaatcagagttcagatccatgtctccaagaggtaggaagtgcagggcaagttatgtggcttctggggcatccctcactttcttagttaaagagaagttgaagtaatcattctgaaatattatgggagtctgcagaaaaagtaatgaaaaccaaagcactttccattaatctccataatttagtccttacgataatgtcacagggcaagcaaccaatcagaccttactagtcgtgcttcctagaagagactgaggttcagagatttggacagagtgtcagatatgggatcagtggctagtccaatgtgatttccatcctttcttctgagagaaagcataagaaggctaagaggatgggggtaaagcacaagtcacctgcctgagagtcaacagagcaggggtctctttctcagtttgtttctctaagttatggcaaaagctttttgagctgtgattattgagaatgggggctgaagttcaacacatagttggcatgagagaagtaattatgattgaagaaatctagatgaaatccattgttcttttctgtaaaggggttgttatccctgattctttttttcttttttcttttttagatggagccttgctctgttgcccaggctggagtgcagtggtgtgatcttggctcactgcaacctctgcctcctgggttcaagtgattctcatgcctcagcctttccagtagctggaactacaggagtgtgccaccatgcccggctaatgtttttatttttagtagaggtggagtttcaccatgttggccaggctggtcttgaactcctgacctcaagtgattcacccaccttggcctcccaaagtgctggaattacaggagtgagccattgtgcctggcctgttctcactgattcttatagtgccatgtttctcagaatttgtggcttcaattacttatatttgtgcacctgacttttaggtgagctccagaatagcattactaattaagaatgagcatttagagtagaaaaagtgacaggaacagcaagactcacttccagaaagcctcactacaggtctaataggtgaggaaagtccccatctttcccatttttcttcattacctccctgtggggcaagcactgccattatgcatgagtaaactgtctgagttatagataagtaatgacatgaaacttcacaaacaggcctagatttctacccagggaaccgctgttatcagagaagggagtttggaatcttaagcaacaaacacatgttgattctcagtatttgcctcctgatggcttgctcagagagcctgttttcattgcccactttatatgtcagtaaataatcttccctggcagtgggtccaccatgtctggatgcacacagggaaatctggtggggtctggccagtgaaaaacactcctcaggttttgcaggaaaagcagtgaacccttcttttaagctcgagaatgctttaaagatgcatcattggcaagccttgccaaagaaatacgggatctaaatgtgataaaagccacgacgacatcaagctggctctggaggtctcctttgaagtttgctgagtggattgtcagtgggaggctgatatttacatgtagaagcacacaagtgttactgctaattgtggtaaatcaggctggccagcctggctctggatcccactgtgcctaacaccagccctgcatcccaggcacatgccgggctcctcagaagcgatcagccagccagcattgtgtgaattgcatttgggttcacagcactgtaattgtccttctcctgctatgaggagcagagagggaaaagggaagggagggttgtgtaatttgccctaggaaattgtgggggagggacaggcactgggccgggtggggggcggtgcgacatggctaaaacactgaccttcccttgagagagaccatatggtgaagtggagagggcacagcttttgcatcacacaggccttgtattagaattttggctctgacaccagctgtgtgaccttgggtcatttgcgaaacctctctgagcctcaactgccccttcttaaaatcagctctaagtaaccacagggttattcttcagaaacacagcatgcacatgcaaactttggcttagtaaataatgatttctttttgttctatctactccacctccctttcccattagaagcttgctacctttcactctgtgttttcttcctctcccattttcctggtggcattcaataaagcagaattctgatttctgcaatgtaggccaccttagagcaaaatacatgatcaggcaccaccaaattaggctattatctactggatcctgtttaaccaacccaaacccaactcaggctaaatacaggaatacaagaaaacgctgaatttctcccctttctttttttttttttttttgagacagagtcttgctctgtcacccaggctggagtgcagtggcgcgatcttggctcactgcaagctccacctcctgggttcacgccattctcctgcctcagcctcctgagtagcggggactacaggtgcctgccaccacgcccggctaattttttgtatttttagtagagacagggtttcaccgtgttagccaggatggtctccatctcctgatctcatgatctgcccgcctcagcctcccaaagtgctgggattacaggcgtgagccactgcgcccttccctccttttttttttaaaacaacaacaacaacaacaacaaacagtttattcagtaattatgtatacgtattttagcttccaaagtcagtgatggaacaaattgagtcctattaggcccactccattgcatgagttagcatcagaggaggtcaaactagagtgacttcatcttgaatatgggctaggtaagaagaggatgaggcctgctgggctgcattcccaggaggttaggcatttgtagtcacaggatgagataggagttgggtaggaatggtttcataaagaccacaggatgcaagctgggtgtggtgccttatgcctgtaatcccagtactttgggaggccaacgcaggaggattgcttaatcctaggagttcaagaccagcttgggcaacatagtgagacctcatctctacagataatttttattttattttattttatttttttgtgatggagtcttgctctgccgcccaggctggcgtgcagtggcatgaccttggctcactgcaacttctacctcaggggttcaagcgattctcctgtctcagcctcctgagtagctggaattagaggcgcacaccaccacgcctggctaatttttttgtgtttttagtagagatggggtttcaccatgttggccaggctggtctcgaactcctgacctcaggtgatccacctgccttggcctcccaaagtgctgcgattacaggcatgaaccaccgtgcccagcctctacaaataattttttttttttttgaaatggaatctcagtctgtcgcccacactggagtgcaatggtgcgatctcagctcactgcagcctctgcctccctggttcaagcgatttgccttacaaatgatttttaaaaaatgagctgggtgtggtggtttcacaagatacgggtgataaagaccccaggatgcgggccgggtgtggtggtttatgcctgtaatcccagcactttgggaggccaaggcaggaggattgcttaagcctaggagttcaagactagcctggacaacatagtgagacctcatctctacaaataattttttaaaaatgagctgagtgtggtggtgcaggcctgtagtcccagctcttgggctaggcatgggggtcagctcaggtgggaggattgcttgagcccaggagttcaaggatacagtgaactatgattgtgccagtacactccagcctgggcaacagtgcaagaccctgtttcataaacaaattaaaaaaccccaaaaacctaggatgcaatgaagaaggaagccgaaacccaccaaaaccaagacggtgatgaaagtgacctctggtcatcctcactacccattatatgctaattataatgcattagcatgctaaaagataccaccagcaccatgacagtttacaaatgttgtattaatgacaggaagttaccctatatggtggaaaaaggaaggaaccttcagttctgggaatttcctccctgtttctgggaaaatcatgaataatgcacccttagtttagcatataatcaagaaataaccataagtatactcagttaagcagcgtggctgttctgcctatggagtagccacccttttttattcctttattttcttaataaatttgcttgaattccttcctgggtaaagccaagaacccatgtggcctcccatggtgatctccaattttgggattcaccatgtgacattaggagcaacttagggatctggtgcatcccaggccaagactaacatggtgatttttggggggttatgttaaaactgggggctctgcccaggcccctcagtgtggcttcttgagtcaatacctgggtacttactggccctagcacctacaagttcattcacagttccttctcactgacttcaccagtgaccactatcagtgacttcaagggagaaatgaggggggagataaaataaagtgaatggggaagagataaagaagagaggtcttttcacagtttgccagaatagtcccttcagtggttttaccccagggcaacaggagcccccttttagtttctttctcttttaattttcttttcccttcccactttttgcccactttttgccttatttgtgtctgactcaatttccgtctctttctctacttcttcattcccagatttggctgtagaaaattagaaagttcttgaacttggtttgcacgggtgcttttactttaacatgaaaatgaatgatcagcctccttctaatttcatcctagagtctactgcatccctcctaccccctgcacaggaatttagtcacacttatctctcccactttctctcccttcttcactttctctattgctcctcctttcatgcttgtacctgcttttccatgccctgtttagcctggcttgggatccagcaggttctccaagggttcctgcaagaaccccggctgggtgcccaggtctgagcctggtatgtgcctcagtatcacaaaggcctcctgtaaatgacacacattgttggaagtttcagaaattctaggtcaaaatggcactgaaatattaaggtatttaccccaacccaagcaacttttctaaaagttgtagagagtgtgacctctttattaattgaaacgtgaaaatcagctctagtttggaagctgagaaaaaatatatatatatgtatttatttctttgttgtttgaattcttaatataaatggtttaaaggaccattgaaaactgcatgcaatcacagaaggttttggcttcaggcagctcccgccatgatcttggggccccattgattctttcatctttcaggcgtcttactgtttgaaccttgaattttaacctgggacatgtttgactaaaatgatgctgttaatattttctgttgtgcaaaacacaaagagaactaggctccagggttgtttctatttgctaatgctgtttctgttgacttttgacttttctagtttcccagagctatggggacttcccatccggcgttcctggtcttaggctgtcttctcacaggtacggagcccagtcctctctgagttccttgtttgggtgtcttgtttttttaagctttgtgctgcatgggtttattaccagtactctgcatacacagtccaaaagagtgaaaagaaatagaaaactataggacgttatccagaatgaccacaaaccttcagttccctttgctgtattgcacttactccatttcaaaaggaatgctctccagtggcagttttagtacatatataatgttggcattgaaatgttgttagtaataatgtctaaatttacttactactctcttccttttcctaggacaaggcttctattagagctggattagataaattcaggaatggtcagctgtgggaggtggcacatctgttgtcccagccccttgagcagctgaggtgggatgatcccttaaggccaggagttcaaggttgcagtgcactgtgattatgcctgtgactagccaccacactccagcaacatagcaagacctcatttaaaaaaaatgttcaaaggaaataaataatagaaaattcttgcccaagaaatcatacttgtcttaaatcataactctcttgaggaaagatgcttacattgcttctaaatctcagagtcacctttatcttctctaggaatcaaattgatagatgaatgtttggctcttggaaaatcttaaaaactttcccaccaaaaggatcattggggtaatttgttgaagtgtgtattggactgtcttagttttcctccagatatttatgcactgcagatgttcgccatgaaaccagtgctcttctattctgaggagttagctcagcccgttagtgtctttgtcttacccatttggatatggtagaattgagcaagaccagagattcaacagttctaagctccactaagtataccccatctacagagtaataggtgatccagatgtacttacaaatcctatcttaacaagctttaggaattatagtggtcatatattgaagttgggtgggagtctcacaccaggttccaagggagattacaaatcactaattaataattaagtcataatatctcttctatcagtctcgggtttcttgttttctaagttctgtgctccatgggtttattatctgtactctgcttacacagtccaaaagagtgaaaagaaatagaaaactacaggacgttatccagaatgaccacaaaccttcagttcctttgctgcattgcacttactctattgcaaaaggagtaagtgcaatttcagtctaaataagcgagactgaaatttgagcttcgaagatgaacttagagttttcactcttgggttttacttaccaattgtgaattaaaatccgtatcatctggcaccactgcactccagcctgggtgacagagcaagactccatctcataaaaataaagaaataaataaacaaataaatccacatcatcctgctttggccctggaagtcatgagggagagacggcatgcccgagggctataagaaatggaagatgtggaattcttgagcacagatgtgctttgtgttttcttcagtctgtgtccttgcctccattcttattccatgtgggttttttttttttttttttttttttttttgagacagggtctctcgctctattgcccaggttggagtgcagaggctgactgcaacctcaatcccctgggctccagtgatcctcccacctcagcctccagagtagctaggactacaggtgtacaccagcacacctggctaatttttttatttttttattttttgtggagaccaggtctcactacgttgcccaggctggtctcgaactcctgagctcaagcgatcctcccacttccacctcacaaagtgctgggattatagacatgagcctctgcgccccagcctcatctcattttaactaaaggaaacctttgcagtgattgtgaaccataaagaacccatatgtgcttgagcccgtgccatcttgggatattttatggttacacataagagtctgaaatatggaattggaatcagacatcctctgtctatttgagtgtttggaggggtgaatctagtggggcttggtggagctatttggaacatttgctgctctcagcagatgcagtggctgttataatgggggagctttcatgggcatccaggctaacggatttttgtgtagaaatggtcattgttcatctaagctgctactgttgcttctctcagttgtcgggatgagactgtcctttctgactgcatcctattcagagcgtgcttccttttgcagggctgagcctaatcctctgccagctttcattaccctctatccttccaaatgaaaatgaaaaggttgtgcagctgaattcatccttttctctgagatgctttggggagagtgaagtgagctggcagtaccccatgtctgaagaagagagctccgatgtggaaatcagaaatgaagaaaacaacagcggcctttttgtgacggtcttggaagtgagcagtgcctcggcggcccacacagggttgtacacttgctattacaaccacactcagacagaagagaatgagcttgaaggcaggcacatttacatctatgtgccaggtgagttggctgggtctccaggaccaagcttcttctcttcctgtctctcctgttaaatgtactaaggttttaaacatatatataaataattaatatttattgcgggaagtttgaaaaatgtaagcgaacacacacaaaaatcatttgtaatattatcaagaaatattcattgttagcatttcagagctgtattaagtttggaaagtcatctttgttatgacatgtcctgtattgatactgtataaacaatctgaaatatactcatctctattcagttcattcaagttgcacacatactcacagtgtgtccagcactgggctaagtgttgagtacacaaaaattaataggtaagccctgtcttggagttgctgatagttcattataatatcttccaaataaacactcgatttttcagattcactatcaacatacatttattcttggagagttggaaggaattttctttttccttttaaaaaagttacatatatatatatatatatatatatatatatatttttttttttttggtaacagggtctcactctgttgcccaggctggaatgcagtggcatgatcatcatagcttactgcaatctcaactcccttggttcaagcgattctcccacttcagcctccccagtagctgggattacaggcatgcaccaccacgcccagctaatttttatattagttgagacgggggtttcaccatattgaccaggctggtcttgaactcctgaccttaagtgatctgcctgcttcggcctcccaaaatgctgggattacaggcgtgagccactgtgccctaatttttatttttatttttgtagagatagggtttcactgtgttgcccaggctggtctcaaactcctgggctcaagtgatccacagccacctcagcctcccaaagttctgggattacaggcacgagccactgggcctggcctactcctgcattttaattaaaaggacaaaagggtcgagcacaagtgatggcaatttcagtatgcagttgggtaaattaaaaaggactatggctagaatccttggttttagaacaaaacctaaactgtttatgattcttgccatccttgctgttttggcataggtgtgtcttcctacctttctgccttttctttttcagtttttaatgggctcctcttcctaccctctataactacgagtgtccccagggatctagaccctctttactttttcatgatactcttattcatatgaaccttccttcttaacaattaaaaaaaaccaaaaactttgttttgaaaagggaaggtatttagaatgtcactccaacttcattcacacttagattccttcaggaaaatcctctaggtgtggagggattttcccctgctgtgaagagaatggtaggaacgtgaatgtgttaaaggcacacgagtccctgaagttttaatccgtgtaagattgtccaaaaattcttcttgttccagcacagatgccatccaagtagcccctgcatcgctgtctgactgagatctttttattcgcaatcatgcagacgtaggggccctttctgcagctgatgtttgagactgttagaacttcttaccaccgtagcttaagtagctgtttttcttttggaaaggaaattctcaggctccttctccttctttaaattttatgtatttctcaaaggattactttttaataaacagatttctatgctatttttgaatcatactgactataggtggtaagagtttttaaaagcatttcataataaaactcgaaatattttttcctgttttaaacagagttggactgtattattttattgttaatttttgtttttagttgtttaaattttgatttagattcctggttagtatttatttatttatttgtagagacagggtctctctatgttgcccaggctggtctcaaactcctgaacacaagcaaccctcccaccttggcttcccaaagtgctgggattacaggcatgagccacaactcctgtccagtattgatatttatcatcagtattatccatcaggagacaggcaatttggtattattcatacttaaaaatcactttgtagctgtcatgataactaatgccagtggggcaattcttctggatatatgtgtaaaggtgaacttcatacctaatatcaataatgccagtgggatagtttttctggatttatgtgtaaaggtgaaattaatgtctaatagagtcttcattcttttttaaaccacagacccagatgtagcctttgtacctctaggaatgacggattatttagtcatcgtggaggatgatgattctgccattataccttgtcgcacaactgatcccgagactcctgtaaccttacacaacagtgagggggtggtacctgcctcctacgacagcagacagggctttaatgggaccttcactgtagggccctatatctgtgaggccaccgtcaaaggaaagaagttccagaccatcccatttaatgtttatgctttaaaaggtacttgtatcatctccttccttctttaaataagagtaacaggcaaaatcataaggtgcgtgtaggatttttttttttttttaaatcatcatcactggtgatcctaaattctgatttggggatttaggaccccagctaatacaatgtctgtggctataataataagcttaaaattactaaaggccaaagcttgattacccatgcaagatttcatgtttcatcagttgacttcaaaatactgtaaggaattcttttcttacataagcctcttactttcattcacattcctgactatggcggccctaaaaacaaacatacacccagggggttagatgcctagattaattttagtaacttaagaaaagtgatttgaagaaagtagtttagacttcaaccctttgatgtccacagttagtacgcttggggaagtataatacatgctgaggtcaacagatatttcctgaacactatattacatggaggaatgggtagcagcaagagtacactgttttaaaatcagagcacagctaattttgtgccaggcactgtgctaggttctgggaaagtactgagaataactgaggagcagagtggaagagaagaagagaagaaacaattggatagaaacaaagtgtctagagcagtgtggatcagcaaatgttggttgattaaatgaataaatttattagtcaaggagattgtggacgagtataaccataactaacccactgctgaggaatgcggtgttctgtttgattggaatttatttttattgttattattttgtaattctgtattataactatatgcctaattgttgtacaccatctcacaatcaagccttgtgagattttccaaattttatcttgatcaaactggtttgcaaattatttttcagggttttcttaaaaaaaaaaaaaaaaacccaaactttataagatcctggctatcctgtggatttttaggcccttgtatttgttcttttttatagcaacatcagagctggatctagaaatggaagctcttaaaaccgtgtataagtcaggggaaacgattgtggtcacctgtgctgtttttaacaatgaggtggttgaccttcaatggacttaccctggagaagtggtaggtaccctcaaaacgtgcaatggcttggagcagagcaacagggctcagaagacctgcatttgagctcggtctgtcactgatgggcacatcactgagtttctctagaccttagcttcccacctctgggatgaacacatttgattaaatggcctttaggactccttgatcaatgggagagtttgaaatgatagttcctggaccaggcccttcagaatacataaagagtgtgccgtaagccttctttttcagaagtcagacagaaataggaaggttctctggctacaagatatcaaccaaaaaattagaagagcaaaaaaaccactggattttactattgcggagacagtgattgattctcatcgtcttggcttctgtgccctgaggtttgattcatctgatagtgttgattgcccgcaccccttcctcttctgccttgttggcacccaggacaatgtgtcttcctgttccacctcctatgtgcctgacctttgcatggctcaccttcagtgaaccgttatgatgtaatcattcagcaaaggtttaatgaagtttgctcaatcccaagcactgtaccagaagctggttcagtattgcaggaagaagggaggaggggagatggaagtggggaaggggagccaccatgctgcctcttggtcactggagatttacagagtctcagtcattctaatgcattgtcactaagtgtgtaagacagccatgtgtaagaggctatgaatgcccaaatgcaggaatgactaatattcttatggagaacaaaaacgagatatatatatttcttgcctccactcctgacttgtaaatttctgctccctgttcttttaggcatttgacagctttctgtccttctatccattgatctccctccttttatccgtttctctctcccatgcatttgccgctgcttttcatttgtcctggggcatctgataggaagttgggcattttcactattgcctcacaaacttcacacagtgaagggacatttacagtccaacaaatgtacatcttccctgaaatatgaagtgatttggttcttctgttcatacttgattgactttaatccttaacacataaacactgctttctatttataggagacagcaatttttttttccaaaccgaagtacatgctatttggcttacaaatatataatcaaagtattgtttcatacagtatgttttttccgattataaaagtaatgcaggtttattgcagaaactttgtaaaatatggagagacaaaggaaaggctacttcccagagcatcactgtttatattttagggagataaagcttttatttttcatttgtatttctttcttttttttttcttttttcttttttttttttgttgtggagatgaggatctcactacattgcccaggctggtctcaaactcctgggcttaagtgatcctcccaccttggcctttcaaagtgttgggattgattacacatgtgagcctctgagcttgactgagataaagctcttaagtatttcttatccatagataaacattgaataataggtgttattctttaaatggtaatttattacattctttatccttcagcagtatagcacaaacaccttatatgtgtcattaactgtccttttaaaaaatgggctgggtgtggtggctcatgcctgtaatcccagtactttgggaggctgaggcaggagagtcacttgaggccaggagtttgagatcagcctgggcaatgtatcaagactccgtctctacaaaaatttttaaaaattagccaggtgtggtggcatgagcctgtagccccagctactcaggagactgaggtgggaggatcacttgaacccaggaggttggggctgcagtgagccatgattgtgccactgcactccagcctgggcagcagagtgagattctgtctctaaaaaaattaaaaacaaaataaaaaatctcatgattttctaagcagctagcttttattctttaggttttatcttttagagcagttttaggtttacagcaaaattgagaggtacagagatttcccatgtgttccctacacccacacatgtgtagcctcccaccttgtcaacatccctaccatccatttgttataactgctgaacctccattgacacatccatatcatccagagtccatagtttatcttagagttcactcctaggagcgagctttttaaaagtcggttttcttccccttttgctgtagaaaggcaaaggcatcacaatgctggaagaaatcaaagtcccatccatcaaattggtgtacactttgacggtccccgaggccacggtgaaagacagtggagattacgaatgtgctgcccgccaggctaccagggaggtcaaagaaatgaagaaagtcactatttctgtccatggtacattccgctttctaaaatgtcagttgtccatgctgctcgggatccatatgtggtaatcattatttaatggaaactcttccctgtacagagaaaggtttcattgaaatcaaacccaccttcagccagttggaagctgtcaacctgcatgaagtcaaacattttgttgtagaggtgcgggcctacccacctcccaggatatcctggctgaaaaacaatctgactctgattgaaaatctcactgagatcaccactgatgtggaaaagattcaggaaataaggtaaagaaactctctgcccaagtatgcctttttttagtgtgcatcagaggcggactgaggtttgtgtgtgtcttacaacccagacccaaagtcagtctagaaaatgtaacaatctgagttaagagatgcttgaaatcacatccctttaatgataacattgcaaagtggtattagtatgctggtaagtatttaatgagaagatgagaagaaagaactaaaagctctggcccctggggaaagacaggtcactggattcagctagggtggaagaaaggaagtaaaattggactcaccaggattgaatagattgaatatattccctgatgttcatcatccatatcgcaagtagacagatatggtgattacacccatgaggcagttatcacatcaccttacgtgaaagttaacgtcataggcttaatctggaacccatttgccctaattgaggactccacaggaaagaagagtagagcctggctaatcaggagagagatgtgcagtgagttgcttggatccctaccttttaatcagaatggtagattgctctcatctcttaattggtggtggagttttgaatgagtcacccctcagccacagtttcctcatctacaatgtaggataaacaataccttatgtccttcaaggcaaggaattggatcagatgatatcatgaggcctcttaaggttttaagctgtgattagaacccaagagtcagaagatacatctcacagcacccagctaaccagccctatacttttgtcagaaatcatctcagaaagacaaagtcagtcctgtatttcaagccttcaggaggaagaacagagcctttctcatcagttccattcacctcaggatttgctttcttctttgtgaactaaattccacgtgtaattgagaagcaatgtctgagaaaatggaattttacagcctctatagaatagtaaaggaaaaatgaagtgggatactgaatctggaaggctttctgttgacacaaaatgaaggtgtacaacaaggagggcagctttccacgaggaacttccatgaggctgtgcagccagagaggaatagggtaacaaccctggtacagctaacacctccaacacgtgtgtgagcactgtctgcaagccataatccatagcagtggcaggacaggctcgccaactgagtggttctggaaagctgccttttccttttagtgattcaaggatgcttcaacgtggattttttagttcctgttatgagccagtgaatacaaagatgaacatggtagatgggggatctggcttcctggagcttaaaactccaggatgggggatctggctttcctggagcaagaaaaccagtggttttcttggccgaagaagtgaagagaacaaacagcagaggataatttggtaatcagcatcctagtgtgccccagggtactctcttaaggaaatccagtcctggagcacacccagtatggtccagcctgctgtcttcgtaggtctgagtgccccagtatttgcaaagtgttttggagcctatgaaatgctttcacacatacaatctcctttaattaactctcacaatgactctgtgctatgtgtacaattatcacgttttacacacaaggaaactgaggcatggagcattgtaataatacccgagatcttctcactccatgaccaatgcttttcttctccattccagttgctttttcaactgtgatgatttataaaggacaatcaaatgggcacatactatatttatgcacatacatacacacacacacacacacacacacacacacaaccagatgtcatttataatccatgtaaaatatttttggggaagtttctctttaataaagtttgaagagacatatattttttttttttgaagaggcatattttttctaacttttttttttttttttgagatggagtcttgctctgtcacccaggctggagtgcagcggtacgatcacggctcactgcaacctccgcctcctgggttcaagcgattcttcagcttcagcctcctgagtagctgggattacaggcatgtgccaccatgcctggctaatttttttttttttgtatttttagtagagatgggggtttcaccatgtttgtgaggctggtctcgaactcctgacctcaagtgattcacctaccttggcctcccaaagtgctgggattacaggtgtgagtcatcacacccagcctataacttttttttaataggtgatagaatcccgtgcttgaaaaataatcaaacaaaaagagaatgcattgtaagaagcctcactgtactcctgtccccagctgcccagttctcccctcctccccacagggaaacatcttcattagtttcattaggttcttatgaaaccttccagagtttctttaagcaaaatacaagcaagtaggactgtcatatcctgcagaccgctacatacaaatacatagaaagtgtcctcattctatcctccagtgatattccattttttggctgaaccacctaaatgatggatatttaggggaagcaagtattttttaaaaaaggtaaaaatcaaaggtttttattttttatttttttaaagaaaagttggtaggctgtgtttattcattcagaagtcaggccgtggctgaactgatagctcttggagatggccattgctcatctctgaatgtctggttttctcttgtaagaattgtgtgtatgatccagaccttcagtgtgtgcactatatattgagaattccagaagagatgatatggacaagaaaaaaagatgactttactttttacagtaaaaataaaacttaaattgaagagtacaattgtttaaacaattggaacttacttagctactgcttgttgaaacaaaatcctttttttaaaaggtatcgaagcaaattaaagctgatccgtgctaaggaagaagacagtggccattatactattgtagctcaaaatgaagatgctgtgaagagctatacttttgaactgttaactcaaggtatgtaaagggagtataaagataatgctagctctgtagatgagtgtcttccaaggaaagcctggcacttttctccccggtcatggaagaaaagcagcacttaggggagaagcagtgtctgcatatgtcacatatcgggaatacctctgctggactcatgaattcaggtatttctgggaggttctgggttactctagagtaggcgaggaatccctaggctccaccagctagctttatttttgtagagatggagtcttgccatgttgctcaggctggtctcctgggttcaagctatcttcccaccttggcctctcaaagtactgggattacaggtgtgagccactgcacctggcctccaccagcttacttagcacctgcttctcaatctgagaagagagaagcagatgaccttagattgttctggagagttttgctacaagttttccttatagacattgtacagtggtccttaccagaagggagtgcccaagtctgtttacattcaggctcagcacctatccagagtcccagccatgagccaggtgctgtctgaggtgcgctcatgtgatcctcacagtaaaacctgtgatacaagcaacaccgtatatctaatttatttgaccacagatttagaaaagaatctttaaaacctaataacataccacagatgcattttggtaaatgctgctttagattatactttagctgaatccattagttgaatcctaagctataatataattttaagaacctccttgcctttcaagccaaataaccaagggactttctctctctctttccctccctcccttccttccttccttccttcttctctccctcccttgttatctcttttcctttcctttctctccttccttccctcttccctttttcctttctctccttccttccttccttgcttccttcttccctccctcctttgttctctcttttcctttcctttctctttttctttccttccttccttcctcactcactcttttcttttcctttctctccttccttccttccttcctccctccctcactctctcttttctttgcctttctctccttccttccttccttttcctccctccctccctcccttgttctcccttttccttccttccttctttcctttcttccttccttccctcttccctcactctctcttttcctttctctccttccttccttccttcattctcccctcccctcccccctcccctccccctcccctcccccctccccccctcccctccccttcccttcccttcccatttttcttctcaccatgttgcccaggcttgcctcaaactcctgggctcaagtgtttctcttccacctcagcctcccaagtagctggggctacatgtgtgaggcatcacaaccatggacttttcactttcttcactccaggttaaaaacatcacagggataaatctcaaaacaccaaaactgtgaaaatgctgctaaccatgtgggtctgtctaaactggagtgttacttgtacaactggtttcagcccctccggagtgttttgaatgccatgtagatgagttgtgaactcatattccactttgtagtctcatatgttctgggacacgagctattccattctgacttctttctgcctcttgcagttccttcatccattctggacttggtcgatgatcaccatggctcaactgggggacagacggtgaggtgcacagctgaaggcacgccgcttcctgatattgagtggatgatatgcaaagatattaagaagtatggaaaacagatgtgtcttcttctttcgtggtcagaatatttctcccttgacacaaatgatgtcaaatacattttacttattgactataagatagggttttgggtgtgatagcttcagggtgtgtatcttttgtcatgaatagctgtgagaagaaggtccagggctctcattagaccttcaaaatgtctccaatctaaaaacaagagtgaattttaagaaccactgttctaagaagatttttactaccctggctcacatatcttatttggtgaactttgtttggtagtcggactgcatgtaaacataaatgtgactgcttagtcccttatctgcccacctgctgtttggtgggttaattcgccattccctcctccctcccccgagtcctcagccttcttaaatgggcacatgagcaatgtgtttacacttcatccatggtaactggttgtgttcagaagcctcagttgtttcttcctctagacagagactcctcatcttaacttctagggctaagaacagacttggatgttgactggggtttctagtagattccagtgtggagcaggattctaggtcttataactcaatctgaggatcatcgcaaccctagtgacaccctaggggctcttcccagtgtgagtgttgagaagggagggctccaggcctttttgaaggggtgggagattgagatcattaaatatggttgaagttgaactgttcagtttgctcataggttcaagattggggaatggtagtcatattttattaaacttgattatctctgcctgctatgtaaacacttagctttcagttgttcatgtgtgagttattccctcttcagcacatgcagacaagttttaatgttcatctgcatgtaaaataaatcagtgtgtattgccccgaaatgcagacaaggtcccaactccttgccatcttagagtgttcccgtggctccactcattgccatgactctcaggaattggccctatacttaggccctttttctctctagatgtaataatgaaacttcctggactattttggccaacaatgtctcaaacatcatcacggagatccactcccgagacaggagtaccgtggagggccgtgtgactttcgccaaagtggaggagaccatcgccgtgcgatgcctggctaagaatctccttggagctgagaaccgagagctgaagctggtggctcccagtgagttcctcaacagtcaggacaactcatcagctgagccgcatctgccccaggcggaactttgaatcccagataggggtcatatagaaatgaaggtcccaaggcagaaattcagttacgaatgctcttaaaggcatgtgggactttgttttattttgttttgttttttgagacagagttttgctctgtggcccaggctggagtgcaatggcacaatattggctcactgcaacctctacctaggacgttgttttagattcagatccaaaactgcatttttgcagaggcccctcaacattttgcttgtctaataatatagctacagtctctactttgaatgtctgtgtatgtggatggagtgtggggaaggatcttctgtctcattgctccttaaaagatagatgaagccaaaagcaatataagcaaaatgcaacttacaaaataagctttataataaagcatatgaagtagaggtgtctgcccatatagtagctgtcaattgcatttatcctattcaaattctgtccacaaggttactgttggagcaactttggagaaaatactgagttctcctgattgaattttgtccccttcttgtataaggaaagagttgatgtagtttcctgggtgtagatggtttgagagatggtactgcctatccctaaaatgaaccaggcagccctcacacttccccaccagcagtgagagattcctggctcagacacagccacactaccttgctgcccctgtgcatgtctgccaggaaacttttcattgtgcctctctctcttgtcacgtagccctgcgttctgaactcacggtggctgctgcagtcctggtgctgttggtgattgtgatcatctcacttattgtcctggttgtcatttggaaacaggtagatattttctcataaaactaaagatctttgaagccaatgagaacaagcatagcaacctagttcagtgcttggcacagagaaggagctcagcaattacatgtggagtgaacgttgttggactctactgtgtccagtcactgtgctgcttcagtgaagctctggtgcactgggactttggtaattcaccagttacctgtcctggtcatttatagaaaccgaggtatgaaattcgctggagggtcattgaatcaatcagcccggatggacatgaatatatttatgtggacccgatgcagctgccttatgactcaagatgggagtttccaagagatggactagtgcttggtaagttccatggggtaacctcccaagactcccttttcccttgcacacaactttacaatttataggccttggcagaatagagatctgagcttgtgcttagtaagaactaggcaatggaaatttgctttcagaaatacatttctgtcttgacagtaagttaattggatcattgcaatgatttttttaaatctctttccataacaaattatagttaaggaaaattttacaaagggagaagagaatatgaagagggctggcaaagatacccaccaaaattgcttttctttagaaatgacacaaattgaaaatgaatttctgtgactaaaaatgagcagatgagaaatgaatgaggacaaccacaaaatgtattttgattcagtacattctgaagatgcattagatactcctttttacatatttggaatatggaatataaaaatataggtacattttgaggcaaaatatgtaaaaataagcaagccaacttatcacaagcatttcaagtatttcaatcctgggctgagaccaagtatatgaagctttagtccaagggagtatttcttttttaaatcacattcctaatgaatgaaagcaagacaaaggcaaatgaaagtagaggtagaggttgtgttatgatgaatgatctaacagtatatatgttaaagaatgccaaatgcaggttttaattatccaccggtctcattgcaaaatacagaagagtttaagtcttcttagagagttaggtaaactgaaatcaagcaaggcaccagagtgaaatcacctttgcaaaaattgtaactgaggaaattatgacagtgaatgagatatgacctaaccaactccattttgctttagcctccaagttgtccttgttccttcctgggcataggccgaactaactttgagaggaacttagtttatagtttgactttgaaaaaaagacaataatagccctttgccaaaacaaaccctctttttgcctgggaactagactgcctttgcgggactaacgaattagctacaagattagaaagtatggtttaggggtcactgttgtaaaacctgaggtcagtgcttgagatattttggagaccctgtatttcgatgcaccagctgacaccacccaggtcaataaactggctcatctgatcttggggcccctacctaggaactgactcagtgcaagaggacagcatcagctccctataatttcatctttgacccaaccaatcagcactccccttttcaccccctacccaccaaatcatccttaaaaaccccattcccccagtttcagagacactgatttgagtaatagcagaatagtagaaattcccccagtttcagagacactgattcgagtaatagtagtaatagtagaataggtctcccgtacagctggctctgtgtgaattaaaccctttttctattgcaattcccctgtcttggtaaatcggctctgtctaggcagcggacaaggagaatccatggggcggttataagagctgccccccaatttcaaatatttatatctaagctttctttattttcctgcctatttcccaacaagggatgaggagcttagggagttaaaaagtagtaaaatatggggaaaagggcataattcccattataccaagaggcattgctggtgaagcaatacctttccaggtacgattttcagtaacacagacgtgcagtaagaggcagtgttggctgttagtgtcttttatgagccaagtcttttcctggcttggctatccgtggtgagactgacaccccgggaaatgtttctctcagggtgagctctttcagggtgggacaacagcttcagtgtctttacgtatgtctcctcccaacatgaagctaattgctgtgctctcgggcatgtttagctcttggtagagtggctttcctaacaaatagggagcagtgagcccagcctgaagtttttatttagtcactccttagaatcagtgatattttgaatactgaagtatttccagtggctagtaatttactaagacaaaagatgcccctgtttgcatatggaaaacagaaggggagagagccaggaggtgtgggtgagagccccgaaggcaagaggatcccaggggctggcccagcacggagctggtagacagcgcgctcacaccagggagggctgcaccctcctttctcccgtctgtgttttctttcccttgcaagtgttattcgacaaaagcaattatgctaatttccttccctgtgggctcaattccttttttgacacgatgacttggaggagtcattatgattactccaaacaggaaagacactcgcccagctgtccgcccgcagagagctggctacggtgcagaaagctgaggaggcgtctggagtttttgggtgttaatgattctgcctgcccacaggtcgggtcttggggtctggagcgtttgggaaggtggttgaaggaacagcctatggattaagccggtcccaacctgtcatgaaagttgcagtgaagatgctaaaacgtaagtgctccttcctggggattttttgagcacggggattttttgagcatggggatattaagggaatttctcaaaatcatgcagctagtaaataagacatttaggactaggtcctgattattttgactccaggttttatgtgtatttagattaggtttatttagattgctcttgctgcctgtatgttggaaaattaagagcttgttatttccagtgacttctttttactagaaagaccaggaattagttattagcactgaggccaagtagctatctgcttcttttagacttctggtaaatagaatgatatccaatcacaggattagtcatattcttggtttttttctgagaacaggaagttggtagctcagctggactgatatgtgatttattctttcaacagccacggccagatccagtgaaaaacaagctctcatgtctgaactgaagataatgactcacctggggccacatttgaacattgtaaacttgctgggagcctgcaccaagtcaggtgggctcactgacctggagtgaggattttcactggacacatgtggttgtgaaaactgttcaatcaggcttaaatcctccactctccatccccacacatggcagggaatagaagtcccttgaatggagctgactggtcccttgaattgatggaagctcattggtttttgagcaaaatctgttgccagtccagtcatagccattcatggctctttattaaaaaaaaaaaaaaaaaaaaaaaaagcttttttggtatcttatttttttctgcgccatatggtctgcaggacaattcatggcttttctgttcttcattttcatacccatctcctaacggcttttgtccccataggccccatttacatcatcacagagtattgcttctatggagatttggtcaactatttgcataagaatagggatagcttcctgagccaccacccagagaagccaaagaaagagctggatatctttggattgaaccctgctgatgaaagcacacggaggtgggtgcaaagagagatgttgctgtctatcattatcttacaggcatcacaaatggaaagacccatgtcctgatagatatcatgtctgcagattcagtgcccaaggtagcaagacttagagtcaaaccaccctgtccagtctttccatggtcatgcagagagatgcatgatgtctaaaggtgttttggactggggtgtcacatgggaaggccttgctgataggtttgaatgagagtgagttagaatgactctgggagctcttctgctatttacatgtgatccacttagacctataaaatgcagctctggccagggatgcttgagttctggaaccttgcaagaactgtctgtggatctccaagctcgaggtccttgctgaacctggacctataaatgacgtcaatgatagtgatccctactgcagaaatctacaagtggctataaagaactctgtaggtaagaaattctgtaagatcagaaagtacaatgaattcacttcataataaattacttggtggacaccaaatgggtgctaaattgattgggtagaaggaattgtatgcccaagccacatgaccacacggctcaagttccaaccaaggcttgtgagttgaaaaactgagaaagaataatgacagacttaatgtagtgaattcttcaaactttaagtgtaatggacttacaggtccatgggagcacagccccactgtcttagatgtggctcttcaggatgtgcgggctcctgctaaagatgtgcagggaactggctctgaaaacaagtgaacagtagtcatcatggcagctgacatttgtggagtcctttgtatgtgccaggtgccatgacaaatattccgctagtctttcccatctttgtcagtgggatccattctacgtcttctgaaaagtgcttccttgacccccagatcaagtcattttccttacaagctattgaaacctttcttccttcacaacacagctgagtttgagttgatctgtgtatttattttgttttttacatttctttttttccctatttaaaaaatttttttatttccataggtttttggggaacaagtggtatttggttacatgagtaaattcttcagtggtgatttgtgagattttggtgcacccatcactggagcagtatacactgaacccagtttgtagtcttttatccctcacctgcctctcaatttttccccgagtccccaagtccattgtgtcattcttatgcctttgcatcctcatagcttagctctcacttatgagtgagaacgtacgatgtttggtttccatttctgagttacttcacttagaataatagtctctaatcccatccaggttgctgcaaaagccattaattcattcctttttatagctgagttatatatatatatatatatatgcacacctacacatacatatgtatagatacactgcagtttctttatccactccttgattgatgggcatttggggttggttccacattttttcaatatgtgaattgtgctgctataaacatgtgtgtgcaagtatctttttagtatgacttcctttcctctggtagatacccagtagtggaattgctgtgatgcatgtatttgtgcgactatttgattaatgctcatttccttgactagatcacctcatgtgaaaggtatggattggttttgcttttacccagttagctcccatgcctacctcagtacctggcacattgtaggtcccccagaatcatcatctactgaaagtggaatgaccacttcagaagggcaccctgggtaagatttctctttctgtttttacagctatgttattttatcttttgaaaacaatggtgactacatggacatgaagcaggctgatactacacagtatgtccccatgctagaaaggaaagaggtttctaaatattccgacatccagagatcactctatgatcgtccagcctcatataagaagaaatctatgttaggtaaaagtgtctatactcactctgggtgttgggactttccagtggtttaatatgatacttaaagtatttagagggaagtgtatagggatggtaagtgaacctggcagcccacgtggtctctaaatgcaggtctgcacaaccagttctgtgacatgtttccaggtttgtggcctgtaaattgaaaagaataaaagctgacaatgtaacaaattttttaaactttaaatttaatagttttaaagaattttcttggtgtgttcctgcagtaaacattttaaaaaaaaaataattatttattctgatataatgaacttccttttttattgctgtctttttcttttttaatgaaaatatggtgattgattttttttaatgcccttacttggcagaattacaagttggctgtcttatgttggttcctcaccttgctttttttcccttaagttttagaagtctctgatgtctatgagttcagtaacccttgcttttacttttcctaacattcaatttgtgataggaactctagagtagataatttgcagttatattttctggaccagtgtttctgttgaatgtattttgaaggtgggtctatctgtttttcaagtacatgaatatgtggcagggttaaattgatttataaactccagggagtccagctgatgcccagaccagatggatcacttcacatctgctcagggtggttcctccagagccctgaactggtcacagacatgaagctggaagtctgacattggcttgtcctgtgagcttgcctttttgggtctgagccttcccattagtcaatgcaaaaaagtgttgagctgccctggacattgttttggaaattattgatgtgctctgaatgttttcaggttcttaagtgaaaggtacaatccatttaaaaaagaatgtgtttgttttgcaaagctcagtacacaatattttccatttctgcggttccaagttccattcacttctcattgccaaatgggtgaacttccaagcgcttttaaaagattagccagtgagagttatcggaaccagtacttcctctcccctcccatattgttaaaaatagtttacattgcttcccaggctgggctggtggagttggcacgagatgtcagaggaacctgagtcatgctcaggcccaagccctgttggcaggcagaccactgctttctggccttccgtgactatctgaaaaaaatcgtgaatggctagagctactcttcacttgctgaacattttcaaaaagaattgagaacttctggattaaattgccttcttcctcgaaaaccctgggacccttccagatgggactaactggggaaagtggacaagttacaaacaaagaaactcaaaggaaagtcattggcactgatctctaagatgctatcacatgtgattggtggttgattttattaacaaattataagcaaagtactacaaaggtggctttaaaaagaaaataaagcaattcacagaaactactttttcatgtagcttgtatgtgtgctccatgtatttcatcatggaagattttagtgtgtgtttatgtgtatgtgtgttttaaaggtagctgagatgatttgctaattatggttgaaaaaaagaaatttaggaggtaaacaaaataattatgtgtaagattggtccttgtggctgtgtgtgtgttttgtgtgtgcgtgtatgtctctgtgtgttttaggctgttcttttattgctataaataaatacttgagactgggtaatttataagggaaagaggtttaattagttcatgattctgcaggctttacaggaatcaagatactggtagatctgctcagtttttggagaggcctcatgaagccatgaagtcatggcagaaggcaaagcagtgcaggcacatcacatggccagagcaagagcaagcgagagagagaaagagagaggtgccacacacttctaaacagtcagatcttacaagaagtcacttactattgcgaggacagcaccagaaggatggtgctaaattgttcgtaagaaatctgtccccatgatccattcatctgccaccagtccccacctccaatactggagattacaattcaacatgagatttgggtggggacacatattcaaactatatcatactgaccctggaccctcccaaatctcatgtccttctcacatttcaaaatacaatcatccctccacaatagtcccctcaagccttaactcattccagcatcaactcaaagtccaaagtcttatctgacacaaggcaggtcccttccacctatgagcctgtaaaataaagaacaagttatttactttcaagatacaatggggttataggcattgggtcaacattcccattcccaaagggagaaatcggccaaaagaaaggggctacaagccccacagaagttcagaacccagcagggctgaaaactccaaataaactccattgactccatatcccatatccagagcacactgatgcaaggggtggagctcttgggagggatggaacaccctgtggctttgcagggtttagcccctgcagctgctctcaggggctgttgtcgagtgcctgtggtttttcctggtgcagagtacaggctgttggtggatatattattcatggaggatggtggccctcccctcgtagcttcacgaggcagtgccccagtggagactctgtgtggggacttcaaccccacatttcccctctgcagtgccctagtagaggttctctgtgagggctccaatcctgcagcatgcttctgtctggacaccctggttttttaatatatactccgaaatctaggcagaggctcccaagcctcaactcttaacactctgtacacccacaggctaacaccacatggaagcggccaaggtttatggctgtcacaagctgaagcagcagcccaagctgcacctgaactcctttgagccacggctggagctggagtcatagggatgcagggagcagtgtctcgaggctgcacagggcagtggaccctggggctggcccatgagaccattcttccctcctaggcctctgggcctgtgatgggaggggctgccatgaaggtgtctgaaatgccttaaaggcctttttcccattgttttggcaatcagcctttgcctcctttttagttatgcaaatttctctagcaagtggttgcccagcagccctctttaattctctcccaaaaaagcttttactttctctgtcacatggccaagctacaaattttccaaccttttatgctctgcttcccttttactttttttttattttaaagagatggggtctcactatgttgtccaggctagtttgaactcttggactcaagcaatcctctcactcatcctcccaaagtgttgggattataggtgtgagccactgcgcccagcctctgcttctcttttaaatataagtttcaacttcaagtcatttctttgcttctgcatctgactgtaggctattggaagcagccaggccatatcgtgaacactttgctgcttagaaatttcttccaccagatatcctaggtcatcactctcaagttcaaacttccacatattcctagggcatggacataatgtggccaagttctttgctgaagcttaacaagggtgacctttactccagttcccaataagttcttcattttcatccgagaccttggcagcctggatttcattgtccatatcattatcagcattttggtcacaagcatttaaccagtctctaagaagttccaaactttccttcatcttcctgtcttcttctgagccctccaaactcttcttatctctgcctgttacccagttatctttacagcaattccccattccttgataccaattttctctattaggctgtttttgcattgctataaagaaatacctgagactgagtaatttataaagaaaagaggtttcattggcacatggattctgcaggctatacaggcatttgcttctggagaggcctcaggaagcttccaatcatggtggaaggtaaagggggagcaggcatatcacatggccagagcaggagcaagtgagagagagagagagagagagagagagagagagagaggtgccatacagttttaaacaggcagatcttgcaagaagtcactcacttttgcaaggatagcaccaaggggatggtgctaaaccatttgtgagaaattcacccccatgatccagtcacctcccaccaggccccacctccaatactggggattacacttcaacatgagatttgggtggggacacatatccaaactatatcattgcgtgtgtgtgtgtgtgtgtataatttttaaaccagatatatgtttctgcatatctctttcctttctttcattctttctttctttttttttttttttttttttgagacagagtctcactctgtcacccaggctgcagtgcagtggtgtgatctcggctcactgcaactcattgcaacctcctcctccctgattcaagcaattcccctgcctcagcctcctgagtagctgggattacaggcacatgccaccatgcctggctaatttttttgtattattagtagagatagggttttaccatgttggccagactggtctcaaacttctgacctcaggcaatccacccacctcggcctcccaaagtgctgggattataggcataagccaccatgcctggcctatatatctattttctaagatagaatctttgcatagtgatattcatctgtgagatctaaacattctacaaaaaaattaagaaaatatttttggatgtgttctttgggcatgcctctgcaacctgatgatttcctgctgcctgccagcaccaatacatttaatttcttttctgcagactcagaagtcaaaaacctcctttcagatgataactcagaaggccttactttattggatttgttgagcttcacctatcaagttgcccgaggaatggagtttttggcttcaaaaaatgtaagttcaaggaacacagacctttttagacccagatttcagtgagtggagtgtggaaggagatgctaggagatagatgttggaaaggccattaataacaggggcctcttacttacctgtctctctccttcatcccctacgcaggtcagggagtctgaaatcatcaggcatctactcttctctagagctttctctctgttgggagtgggtggagtgagaacctgggagaaggccagccctttatatccaggcagacagctccaagtgccaccatggatcagccagtcttgcaggggtgatgctatatcagctacagatggcttgatcctgagtcatttcttccttttccatgcagtgtgtccaccgtgatctggctgctcgcaacgtcctcctggcacaaggaaaaattgtgaagatctgtgactttggcctggccagagacatcatgcatgattcgaactatgtgtcgaaaggcagtgtacgtcctcacttccctcactggtcaggctcatcctccttcactttaatctctaaagtcaggtgttgcttctagagattcggtgcctgttttttaaaacatcaatagatttcaaggggtcagtacactgccttggcagcagattgcccaggtgtgagtgccagctccaccacttacttaatttggatttggggctagatacttgactgttctgcccctctgtctccctgattgtagtgggaggtgataatagtacctatttgctgagttgctatggggattaaatcaatgaattcatgtaaagtgcttaggacagtgcctggcatatagaaacagcactcaataatgttagctattttatttatttatttatttatttatttatttatttatttattttctttttttttgagacagagtctcactctgtcacccaggctggagtgcagtggcgcaatcttggctcactgcaaacttctgcctcccaggttgaagcaattctcctgccttagcctcccgagtaggtgggattacaggcatgcaccaccatgttcagctaatttttgtatttttagtagagacagggtttcaccatgttgcccagactggtctcgaactcctggcctcaagtgatctacctgcctcagcctcccaaagtgctgggatgacaggtgtgagccactgcatctggcaagtgttagctattaatatgtcaattgcgtgtatgcatggacaagcatgcattcccaaggatggtgtctttatattttaagcttttatcagattttcaaaagccatctgtgacccctaaaatagattggaaccatttgggtttatgtatcttggaggcacagtttccttaaagatactcattttgttgtctacttgaaccattcttcccatcccttccacttctcagcagatgacatagctccctgtggggatatatctgctccctgtaggtacaattccaaatcacctcactgcactggatgtgagacagcttatggcagctgctgcttccacctagagaaagacatgggcctgcatccatgctgtgtgtgattcatgtactcatgtggccgtgatagctgtaatcggctcatagatcattggatctgttcttagttttgttcccaggaatatctaaaaataggaaactggtccattcagggcttacaccttttgggtgaaaattcaggattaatgtttttggatattattcctttggaggacataaaaggcaatattgaccattcatcattcatctagtatttattgagcacctactatgtgccagggactgagagttcagtaatgaacaaaacacatgtaaaagacactcaaatgggacaagataattagcacaagttattaagagcccaaggggaacccttttctatttccactgctgtggatcatcagtgagtagacatgggtttaactgtctccctccttccttgcagacctttctgcccgtgaagtggatggctcctgagagcatctttgacaacctctacaccacactgagtgatgtctggtcttatggcattctgctctgggagatcttttcccttggtatgggcctgacattgctgcttatttgggctgttctgaaacaccactggaaggaaaatgtgttctttcaagccccaggatgtagacagtgttaagataacctggtgtgaggccagtatgctgcagccgcctcaaaccacatgttgtgccttattgtgtctgagataggcccatgcaggtggagatgggggtttttgttgggggttgcgtctcactcctggcctctgcccctcctctcctttgggctatgccagagtgacttcctcccactggaagtggtcccaatgacattcgcatcccagctgctttttcattttgggctttgggtcacatgggttcacccatggagagtgggccctccctcacctggtggcgattgatgctcaggtgaaaaggggtacgtggcgggaagggcagggctctcattcctggttgtcattggccagtcttgacaacccaggtgctgaacaacccaggtgccctgggctatccggtgaggtccctaagagaaggatgagccataaccctgacatctggatggttcatctggggagatgagacttacacacttagggataaacagtgtgctgctgatttaaaattgtaatttgagtcttgagtaaagagaaaggagtcctggaatagtgtgggaaggcttcagagagggaacttaacttgacctggccttggctttgaaagtgtgaaatgtttcatgaatttatctgtgatcaggatgtaatagtaaagtgtgtcttcctgccccgtctcctttttcatcctagttctccctccatggatgatcacaatggatcatccccgagtggcttaatggagtcctgtactcccttaaaagcagagaggccacaactttgatttttgctttagctatttgaacatacctggtgaaaaagactctctgggttttaatgattcagaatttctccttgcttttctagttcattttgtctgtgttgatccagtagtcatacacattgaaaaacacttgaacgcttatttctaaagatgtagaatttttgtgatggtacttggacttgaccaacctggagtcctaattaaacttaaggtttgagctggtctctgaagtcaaggagatgatgacactgaattttcttgaaaaaaccagtgcttcaaggctataggatctgaaaggttttctaacagtgttctatcatgccaagtgtttcagcaatgcactgagcgtttgttagtcctggtgttttattgtttggcttttaggtggcaccccttaccccggcatgatggtggattctactttctacaataagatcaagagtgggtaccggatggccaagcctgaccacgctaccagtgaagtgtgagctccttccccatcccgggggcctgtgttcacagtctgtgggtctagggggagggaggggccctgagacttccccctgtgcccactcttgagttctgtccccacagctacgagatcatggtgaaatgctggaacagtgagccggagaagagaccctccttttaccacctgagtgagattgtggagaatctgctgcctggacaatataaaaaggtgtgtttggatctgtgggtggaaaggtctggataaagctggaagttataccagtgagctgtgctgttccgcagttctagaggagcattttcaaaagaggcaaaagactgtgtgatccagtggctgggcttcatggcggtgctccacgagaccctagtagcaatgatgaatgaaaaccctccccttcccgtggggctttcctttcatcttatatgtgcagtacctgtaagcactattctccagatgtttgagtatcagaagttagtgtgcagttagaagactcagggcatccatggccattacatcactaatttgagtgcacttaaatccatgcgaaattggcttttaccagcggactggaaggaacaacctcagctgttatctgtggcaccagctggttttttgtggaataggaagcattgttcaaaggaacaaatgtaatttcttggaaccaggcaggatatgtaaatgaatgaaacaactttctgctgaggtgttgagaggaaaactcagacataacctcagtttcttagattgagattagtccctgtgtagactttttatacttatcatttttcttccttcttctcaaggaggaatagtgttaggagattgtgtgccgaactggaagttaaatgcttctgtctgttaattatctcactgcccactacaactttcacaggtgaggcagtgaggaggcagaaggaaattaaccctcagttggtcaaagatgctctgactggtggaaatgtgttggtgggaagagattgaagttattgttgaaaatagggtcttttcacatccaatgttagacctctccaatgtttaaggatcatgaaggctttgggtattatccacccaatagaaggcctcactgcctctctatgggacccatccaagccctggaaaggcaacgtgatggggaccagaaggattctcagttgtagctactgacttggagaaggggctactggtatcttagcacctaatggcagaagctctttaccattggtggccccttcttcatgttctatgtctctggggatagttgacatgactctccttcaactaagtcccacatcttccaggtagtttggaaatatgtacagttaaataatggtaagttctgagtgtctctattcatttttgaggtttggttgttaacacttgattaaatatgttcaatgaatgtttatagagttatgaaaaaattcacctggacttcctgaagagtgaccatcctgctgtggcacgcatgcgtgtggactcagacaatgcatacattggtgtcacctacaaaaacgaggaagacaagctgaaggactgggagggtggtctggatgagcagagactgagcgctgacagtggctacatcattcctctgcctgacattgaccctgtccctgaggaggaggacctgggcaagaggaacagacacaggtagctgtgggggcagcctcggtgtctcacctttcccctcccctataggccctgaaggagaggacccattttcccgataatggtgcactcccggttggtaaatatgtactcagggacaagttgcagaatcctcaggaggtccacgtggttttgaaaatgcttcccagatgattctaatatgttccccctggggctgggagagggatgtgcatgttgtggggagagggacatgcttccctggtggagaatctttgagctaaattctcaggtaatttgatcaaattgatacagaactgtgattactgagatcatataagcctctcctgccattgtcttaaatagtcattgaactggggaaaaagtgaagagaggcgggactgggtcctttgacgctataccctacctgtgaatttgaatcacctgcagagatttaaaaactgctgatctacaagcctcacccaaaacaacaaattagaatccctgggggtggtggccaactgctccctggctgatttgtttcttctttcttttaaattttgtattatggaagatttctaacgtgtgcacaattcacatagtatagtgagctgttcagtattcgtcacccagcttcaatgactatgccctctgccagcctggatgcacacatggccatgtctgtctctcctcagcctcctctggattgtttggaagcaaatcctagacaccttatcatttcacccataaatattccagtgtgtgtctcttaaagataagggctctattttaaagaagaacaacagttattaaaaataactacaatgccgttatctcacccaaaacagggacaataaatcgttaaggcatcaggcagccagttaaagttcaaattatctcacaaatattatcatactccattaaaaagtgggcagaggacataagcagacacttttcaaaagaagacatacctgcagccaacaagcatatgaaaaaatgctcaacatcactgatcactagagaaatgcaaatcagaaccgtgatgagataccatctcacaccagacagaatggttattattaaaaagtcaaaaaataacagatgctggtgaggttgtggagaaaaggggaagcgtatacactgcttgttgaagtgcaaattagttcagctattgtggaaagcagtgtggtgatttctcaaagaacttttaacagaattaccattggatccagcaatcccattactgggtatataaccaaaggaatataaatcattctaccataaagacatgcatacgtatgttcactgcagcactattcaacgatagcaaagacatggaatcatcctaaatgcccattgacagtagactggataaagaacatctggcacatatacaccatggaatactatgtgttgataaaaaagaacaagatctgagataccatctcccaccagtcagaatggctattatttaaaagtcaaaaagcaacagattgtggcgaggttgtggagaaaaagaaacacttttacaatgttggttggagtgtaaattagttcaaccattgtggaagacagtgtggcgattccccaaagacctagaggcagaaatactgtttgacccatcaatcccattactgagtatatacccagagtgatgtaaatcattctattataaaggcacatgaatgtgtatgttcactgctgcactgttcacaatagcaaaatcatggaatcaacctaaatgcccatcaatgatagactggataaagaaaatgtgatacatatacaccatggaatacgatgcagccgtaaaaaggaatgagatcatgtcctttgcagggacatggatggagctggaagccgttaccgtcagcaaactaacacaggaacagaaaaccaaacaccacatgttctcacttataagtgggagctgaacgatgaggacacatggacacatggagggaaacaacacacactggagcctttcaggggttggggattgggtggaacatcaggaagaatagctaatggatactgggcataatacctgggtgatgggatgatctgtgcggcaaaccaccatgacgcatgtttacccatgtaacaaacctgcacatcctgcatatgtacccctgaacttaaaaagtggaaaatacaaaaatgaaattaaaaaaagaacaagatcatgtcctttgcagcaacgtggatggagccggaggtcactatccttagcaaactaatacgggaacagaagaccagataccgcatgttctcacttataagtgggagctaaaacaacgagaacacatggacacaaagaggggaacaacagacaccagggcatagttgagggtgcagggtgggagaaggaagaggatcagaaaaaatacctatcggatactgtgcttattatttgggtgatgaaataatctgtacatcaaaccgccatgacatgtgatttatccatgtaacctgcacacgtgcccttgaacataaaataaaagttaaaaaaaaattatcatacacttgttttgttctgtctgagatccagataagagtcacacattgcacttggttgctatgtctctgtaagttcactatgcctctattttttgccctcttacatattatttgtgaagaaaccatagtgtttgcctgtggagttcccacaatcggcattttgctgattacatccttgaagtgtccttctcaggtgcttctgtcttctctatgtgttgtaaactggtagttagtctaggaacttaacctgactcaggttagatctttggcaaacatgcttcatagatggttctgtgtgcttctgtcaagaggtatgcactgtccagttgtctgccttttgtaacattatcagtcattgggtgatcattacctagaatttcttttttttttttttttttttgagatggagtctcgctctgtcacccaggctggagtgcagtggtgtgatctcagcttactgtaacctccacctcctgagttcaagccattctcatacctccgcctcctgagtagctgggattacaggcacatgccaccatgcccagctaatttttgtatttttagtagaaatggggtttcagcatgttggccaggctggttttgaactcctgacctcaagtgatctgccggtctcggcctcccaaggtgctgggattataggcatgaaccacctcacctggcctagattctttaactcagcaccaaggtggagctaatgcccaggcaggactgagaatcactggttgacgtggtcagatggaggagaccatgccccagttctccgctgtctttgcatggcccttggacagaggtaggagaaggtgatgatagtggcccctagttcaaggtccaagttgcttgtgtgtgtgtgtgtgtgtgtgtgtgtgtgtgtgttttcctcttctttcccatcagaacattattttggaggcttatgactgtgacctttgttaaccaatttaggtataatatgtagacagcccttgtttatttgtatggactgggtaattttgaaagtatggcttttctattttgttttagaatatgttatgtgatttgaagatgggacacagtggcccatcagtcttcggttttttattatgctttgctcaggccagtttttataacgtgtttatatctcttgagcatacggtgttcctccaagttttgggggtctgcgatggaacttcacgggggtcggggaaggctgggcagtgaatctagggctctctgtctcagatcctttctcaatttggttactttgtgtttgtgggctctgaataatatttgagttgtaagagggttctgcttttatataaagttagaaagtcacattggaataaataacatgagaaaggtgcccagaagttttctagggctacaacaggctgagctgcagaatttgacacgccaggaattgaactttctcagttgaagttcacgttcaagttaagtaacttgtgtggcatcacacagctagtaagtggggggaccattccagacctaaggctttctgactccagaactcccctttcagccacttctctagtacgtaaggagccgtcacctgggccctcaagttgggggttggtgggggggcatttgatgtcaagagagaggggaagagggcattccaggcaagtggcaggagatcctgagaacacagtttggatgctcaggaggcttccgggagagcacctgatgggcctggctgcagcttgcaccctgatgggcctgacttcaccccctgctctgccttcccaggcctttggatcaggcattgcttatgttctcttccactaggattgagtagggaaagtagaaattcttgcagcttgtcagtaactttgatgaaagacccagcagaaaagcaggaaagctgaagagtaaaaatgatgggtggaccttggttttccacgtggcctaccacagcatgtcaggcctgggggcagaatcttgccatactgtgcagcccaaatttgaatgccaaaggctttcgtttgtctctggggggccacagtctaggtctagttctgtgtaggagttgtaatatttgctcttctctccctcctccagctcgcagacctctgaagagagtgccattgagacgggttccagcagttccaccttcatcaagagagaggacgagaccattgaagacatcgacatgatggacgacatcggcatagactcttcagacctggtggaagacagcttcctgtaactggcggattcgaggggttccttccacttctggggccacctctggatcccgttcagaaaaccactttattgcaatgcggaggttgagaggaggacttggttgatgtttaaagagaagttcccagccaagggcctcggggagcgttctaaatatgaatgaatgggatattttgaaatgaactttgtcagtgttgcctcttgcaatgcctcagtagcatctcagtggtgtgtgaagtttggagatagatggataagggaataataggccacagaaggtgaactttgtgcttcaaggacattggtgagagtccaacagacacaatttatactgcgacagaacttcagcattgtaattatgtaaataactctaaccaaggctgtgtttagattgtattaactatcttctttggacttctgaagagaccactcaatccatccatgtacttccctcttgaaacctgatgtcagctgctgttgaactttttaaagaagtgcatgaaaaaccatttttgaaccttaaaaggtactggtactatagcattttgctatcttttttagtgttaaagagataaagaataataattaaccaaccttgtttaatagatttgggtcatttagaagcctgacaactcattttcatattgtaatctatgtttataatactactactgttatcagtaatgctaaatgtgtaataatgtaacatgatttccctccagagaaagcacaatttaaaacaatccttactaagtaggtgatgagtttgacagtttttgacatttatattaaataacatgtttctctataaagtatggtaatagctttagtgaattaaatttagttgagcatagagaacaaagtaaaagtagtgttgtccaggaagtcagaatttttaactgtactgaataggttccccaatccatcgtattaaaaaacaattaactgccctctgaaataatgggattagaaacaaacaaaactcttaagtcctaaaagttctcaatgtagaggcataaacctgtgctgaacataacttctcatgtatattacccaatggaaaatataatgatcagcaaaaagactggatttgcagaagtttttttttttttcttcatgcctgatgaaagctttggcgaccccaatatatgtattttttgaatctatgaacctgaaaagggtcagaaggatgcccagacatcagcctccttctttcaccccttaccccaaagagaaagagtttgaaactcgagaccataaagatattctttagtggaggctggatgtgcattagcctggatcctcagttctcaaatgtgtgtggcagccaggatgactagatcctgggtttccatccttgagattctgaagtatgaagtctgagggaaaccagagtctgtatttttctaaactccctggctgttctgatcggccagttttcggaaacactgacttaggtttcaggaagttgccatgggaaacaaataatttgaactttggaacagggttggaattcaaccacgcaggaagcctactatttaaatccttggcttcaggttagtgacatttaatgccatctagctagcaattgcgaccttaatttaactttccagtcttagctgaggctgagaaagctaaagtttggttttgacaggttttccaaaagtaaagatgctacttcccactgtatgggggagattgaactttccccgtctcccgtcttctgcctcccactccataccccgccaaggaaaggcatgtacaaaaattatgcaattcagtgttccaagtctctgtgtaaccagctcagtgttttggtggaaaaaacattttaagttttactgataatttgaggttagatgggaggatgaattgtcacatctatccacactgtcaaacaggttggtgtgggttcattggcattctttgcaatactgcttaattgctgataccatatgaatgaaacatgggctgtgattactgcaatcactgtgctatcggcagatgatgctttggaagatgcagaagcaataataaagtacttgactacctactggtgtaatctcaatgcaagccccaactttcttatccaactttttcatagtaagtgcgaagactgagccagattggccaattaaaaacgaaaacctgactaggttctgtagagccaattagacttgaaatacgtttgtgtttctagaatcacagctcaagcattctgtttatcgctcactctcccttgtacagccttattttgttggtgctttgcattttgatattgctgtgagccttgcatgacatcatgaggccggatgaaacttctcagtccagcagtttccagtcctaacaaatgctcccacctgaatttgtatatgactgcatttgtgggtgtgtgtgtgttttcagcaaattccagatttgtttccttttggcctcctgcaaagtctccagaagaaaatttgccaatctttcctactttctatttttatgatgacaatcaaagccggcctgagaaacactatttgtgactttttaaacgattagtgatgtccttaaaatgtggtctgccaatctgtacaaaatggtcctatttttgtgaagagggacataagataaaatgatgttatacatcaatatgtatatatgtatttctatatagacttggagaatactgccaaaacatttatgacaagctgtatcactgccttcgtttatatttttttaactgtgataatccccacaggcacattaactgttgcacttttgaatgtccaaaatttatattttagaaataataaaaagaaagatacttacatgttcccaaaacaatggtgtggtgaatgtgtgagaaaaactaacttgatagggtctaccaatacaaaatgtattacgaatgcccctgttcatgtttttgttttaaaacgtgtaaatgaagatctttatatttcaataaatgatatataatttaaagttatactaaggtttcagcatttttgtttttagtttaatcataagaattaaagcaatcctgttctatttactttcttagcaacatttgtaggactctatattaggccttttttttttttttcctgagatggagttttgctcttgtcatccaggctggagtgcagtggcgtgatctcagttcactgcaacttctgcctcccgagttcaagcaattctcctgcctcagcctcccaagtagctgggattataggcgcctgccaccatgcctggctaatttttgtatttttagtagagatgggggtttcatcatgttggccgggctggtctcgaactcctgaccttagatgatctgcctgcctcggcctcccaaagtgctgggattacaggtgtgaaccaccacgcctggcctttattaggcttttgatgaaccaatagaatatctaaggtttaagacattatatgagctagattgttccacgacacagtatttgacttaaagatgattggcacttggctcatctttggtctcatcatttttttgattgttcatctttatcctgtggtgttttcttcccctgcataaggaatacaggactgcagtaactctgtacaacattcaactgtcgtaaaagtgtaggaagtaaaatgttaaattatttttttcaccgtgtcttcttccctgtccctgtcctgtttccaagaggcagagctgcaccacttggtgtgtcttttaaacttccagttccctttgtatgcatctgtgtatatatattcccatacacacatctctacgtttgcttcatatctacctaaatgggttctcactttatgtaatcctttgtaatgttcttttttctttcctttttaaaactatttattaaagcagttttagatttgcagtaaaattgagtagaaggtacagagatttcccctgtgtgccctgcccccacaccaacatagcatctccatcactaacattctccacctttgctacagctgatgaacctacattgccaaatcattacccataacacagtccacagttctgttttttttttaatgctgttttagcgatctctgtgaaaagtatacagaggtattagctccattggatcccattatgtaaatgtaccataatttatgcaatcatggtcttgtaaaatggatttacagtttccagttctttgctattaaaatgatttcatgaacatttttgcaacatacatatttgcatacaaaaatgtgttttgtagaatggatttctacaaatgaaattgctaggccaaagggtgtgcagaaataaattgatgttgagctgaagtcttcagataggattgatacataagttcttgagcatctgcacgtgaatcactggctttgcacattacatgcagttttctagtctctgctccacattgcccaggaatcatggtcttcaaaataggattggaagaaatacaatgtggtaagtgtgagagaatgtgggttttgtgttctgaagcatactgaagcaagtgactttaggaatttaaaaaaatggtacaactcaccttattttgagctcacggataatgaaaattgattatgttgttaataatcagaatatagcaccctattccaatataactccttatccaaattcaagtagcctgcagctggaagcatacttctttggagttaaacctccaaggagggattcagaagatcatggcatatgagaggcaagactagattgcagctcaggacagagcagcatgcagcagcttgcattgtgaattttagctccagatcctgagaggacccacagaccctctgatggaagtggacttctcctgcaggaccggggagacaccccaaatattgtgagttgccccaaatgcggaagtggtacagggagaccctcctctaccgaatgcgcagtcccactggagcagctgaagttttgcttgcgggagaagtttctgactttacctcaagctgagtcaagttagagagctgagcaaaatacaggggtggaggaagcagcagaaaggccctgggagctcgctgagtccccaagcagcccattcctgcctggcaccacagggatccatagggagggtggccagaggagcagggggtaaaactccacagggagaaggaaatctctagctgaactttgtaacaatttgaaaggggcaagaagcttcctggccggaactcgggggagggtgcaaatcgggcgtacagacttcacaggcagaggaagaactaaagcccttttctctcccagctgggaggaggatagccttgggcaagttttcaagcccatcttgccctctgcctggaaacagactcagggctgttgaggtgggcagggtgggagtgagacaagcccttcggtttgtgggggagctgggtgaggcttgtgactgccggctttcccctacttgcctgacaacctgcatgactcagcggagacagccataatcctcctaggtgcacaactccagtgacctgggaatctcactcccatttccccccagcagcctcagcaagacttgcccaaggagagtctgagctcagacatgcctagcctcacccgcacctgatggtcctttcctatccacgctggtagcataagacaaaggacataatcttgggaattctagggctccgccctccactggttcctctccacactactatagctgatgcttcctgggaagtaccaccttctggcaggaggccaaccagcacaaagataaagcattaaaccaccaagactaaggaccctcatggagtccattgcactgtccaccacctccaccagaacaagcactggtatacatggctgagagacccatagatggttcacgtcacaggactctgtgcagacaacccccagtaccagcccagagctgggtagactaattgggtggctagacccagaagagagaaaacaaccactgcagtttagctcataggaagccacatccataggaaaagggggagagtactacatcaaaggaacacccagtgggacaaaagaatctgaacaacagccttcagccctataccttccctctgacagagcctacccaaatgagaagaaaccagaaaaccaaccctggtaataggacaaaacaaggctcttcaacacctcccaaaatcacactagttcaccagcaatggatccaaaccaagaagaaatcctgatttacttgaaaaagaattcaagaagttagttattaagcttatcagggagggaccagaagaaggtgaagctcaatgcaaggaaatctaaaaaatgatataagaagtgaagagagaaatactcatggaaatagatagcttaaggaaaaaacaataaaaaattcaggaaactttggacacacttttagaaatgtgaaatgctctggaaagtctcagcaatagaattgaacaagtagaagaaagaactttagagctcaaagacaaggtcctcagattaacccaatccaacaaagacaaagaaagaagaataagatgcagccataaaaaaggatgagttcatgtcctttgcagagacatggatgaagctggaaaccatcattctaagcaaactattacaaggacagaaaaccaaacaccacatgttctcactcataggtgggagctgaacaacaagaacacatgaacacaggcgggggggaacatcacacatcagagcctgtcagggggtggggggccgggggagagatagcattaggagaaacacctaatgtaaatgacgagttgatgggtgcagcaaaccaacatggcacatgtatacctatgtaacaaacccgcacattgtgcacatgtaccccagaacttaaagcataataataaaaaaaagaaaaaagaataatatgaacaaagcctccaagaaatctggaattgtgttaaacaaccaaatataagaataattgttgttcctgaggaagaagacaattctaaaagcttagaaaacatacttgggggaataatggaggaaaacatccctggccttgtgagatactagacagccatatacaagaagcataaagaacacctgggaaattcactgcaaaaagatcttcacctaggcacattgtcatcagattatccaaagttaagaccaaggaaagaatcttaatagctgtgagacagaagcacaaaggaaaacctatcagattaatggcagatttctcagcagaaaccctacaagctagaagggattggggcactatcttcagcctcctcaaacaaaacattttatcggccaagaattttgtatccagcaaaactaagcatcatatatgaaggaaagatacagttgttttcagacaaataaatgctgagcgaattcaccattatcaaactaccactataagaactgctaaaaggaaccctaaattttgaaacaaatcctggaaacacattgaaacagaacgtctttaaagaataaatcacatagggcctgtaaaacaaaaatacaatttaaaaagcaaaaacaacaaacaaaaaaccaaaccacagaggcaacaaagagcatgatggaagcaacagtacatcacatttcaatactaacattgaatgtaaatggcctaaatgctctacttaaaagatacagaaccacagagtgggtaagaattcaccaactaactatctactgccttcaagagactcacctaacacataaggacttacacagaattaaagtaaaagaatggaaaggggcattttgtgcaaatggacaccaaaatcgagcaggggtaactattcttatatcagaaaaaaacaaacaaacactttaaagcaacagcagttaaaagagacaaagagggacattatataatggtaaaaggccttgtccaacaggaaaatatcacaatcttaaacatatatgcacctaacactggagatcacaaacttataaaacaattactaatagtcctaagaaatgagatagacagcaacgcaataatagtgggggacttcaatactccactgacagcactagacaggtcatcaagacggaaagtcaacaaagaagcaatggatttaaactatactttggaacaaatggacctaacagatatatacaaaacatttcatccaacaacctcagaatacacattttattcaacagcatatggaactttctccaagatagaccatatgataggccataaaataagcctcaataaatttaagaaaattgaaattatatcaagtactctctcagaccacagtgaaataaaactggaaatcaactctaaaaggaatcttcaaaaccattcaaatacatggaaattaaataacctgctcctgaacgagcattgggtcaaaaacaaaatcaagatggaagtttaaaaattctttgaactgaatgccaataacgacacaaccaatcaaaacctctgggatacaacaaaggcagtgctaagagtaaagttcatagccataaatgcctacatcaaaaagcttgaaaaagcacagacaacctaaagtcacatctcaaggaactagagaaacaagaacaaacaaaacctaaacccagtacaagaagaaaataaccaagagcagaactaaataaaattataaccaaaaaaaagataaatgaaacaaaaagctgatcctttgagaacataaataaaatagaccattagcaagattaaccaagaaaagaagagagaaaatccaaataacctcactaaaaaacaaaacaggagatattacaactgacaccactgaaatacaaaagatcatttaaggctactatgaacacctttatgtacataaactagaaaacctagaagagatggataaattcctggaaaaatacaatcctcgtggcctaaatcaggaagaattagatatgctgaacagaccaataacaagtagtgagattgaaatagtaattaagaaattataaaccaaaaaaagtccaggaccagatggattcacagcagaattctaccagacattcaaagaagatttggtatcaatccttttgacactattccacaagatagagaagaaggaaccctccttaattcattttatgacgccaacatcaccctaataccaaaaccagggaggacacaaccaaaacaacaacaacaaaaacaaacaaacaaacaaacagaaaaaacactacagaccgatatccttgatgaacatagatgctaaaatccttaacaaaatactagctaactgaatccaataacataaaaaagataatccaccatgattaagtgggtttcataccagggatgcagggatggtttaacatatgcaagtcaataaatgtgatacaccacataaacagaattaaaaacaaaaatcacatgaccctctcaatagatgcagaaaaagcatttgacaagatccagtattgctttatgattaaaactctcagcaaaattggcatacaagggacataccttaatgtaataaaagccacctatgacaaacccatatccaacataatactgaatgaggaaaagttgaaagcattccttctgagtactggaaaaagacaaggatgcccactctcaccacttcttttcaacatagtactagaagtcctatccagagcaataagacaagagaaaaaaataaagggcatccaaacaagtaaagaggaagtcaaactgtcaccgtttgctgatgatatgatcatttaccttgaaaaccctaagtaaggactcctccaaaaagctcctagaactgataaaagaattcagcaaagtttctggatacaagattaatgtacacaaatcagtagctcttctatacaccaacagcgaccaagtggagaatcacatcaagaactcaatcccttttataatagctgaaaaaaaaatacttaggaatatacctaacaaaggagtcaaaaaacttctacaaggaaaactacaaaacactgctgaaagaaatcatagatgacacaaacaaatagaaacacatcctatgcccatggatgggcagaatcaatattgtgaaaatgaccataccaccaaaagcaacctacaaattcaatgcaacccccatcagaataccaccatcattcttcacagaattagaaaaaacaattctaaaattcatgtggaatcaaaaaagagcctgcatagccaaagcaagactaaacaaaaaacaaatctggaggcatcacactacctgatttcaaactaccctgtaaggccgtagtcaccaaaacagcatggtactgttataaaaataggcacatagaccaatggaacagaatacagaacccagaaataaacccaaaaacttaaagccaactgatctttgacaaagtaaacaaaaatataaagtggggaaaggacacccttttcaataaatggtgctgggataattggctagccacatgtagaagaataaaactggatcctcatctctcaccttatacaaaaatcaactcaagacggattaaggacttaaacctaagacctgaaactataaaaattctagaagataacactggaaaatccctcctagatattggcttaggcaaggaattcatgaccaagaacccaaaagcaaatgcaataaaaacaaagataaatagctgggacctaattaaactaaagagcttttgcacagcaaaaggaatagtcagcagagtaaacagacaacccacagactgggagaaaatcttcacaatctatacatctgacaaaggactaatatccagaatctacaaccaactcaaacaaatcagtaagtaaaaaacaaataatcccatcaaaaagtgggctaagggcatgaagagacaattctcaaaagaagatacacaaatggccaataaacatgtgaaaaaatgctcaacatcactaacgatcagggaaatgcaaatcaaaaccacaatgcgataccagcttactcctgcaagaatggccataatgaaaaaatcagaaaatagtagatgttggtgtgaatgccatgaacagggaacacttcaacactgctggcaggaatgtaaactatgacagccaccatggaaaacagtgtggagactctttttttttttttttttttttttttttttttttttttttttgagacagagtctcactctgtcacccaggctggagtatactggtgcaatcatggctcactgcaacctctgcctcctgggttcaagtgattttcctgcctcagcctcctgagtagctgggatcataggcacctgccaccactcccgagtaatttttgtatttttagtagagacgagtttcatcatgttgaccaggctggtctcgaactttctgacttcaggtgatccacccacctcgggctcccaaagtgctgtcattacaggtgtgatccactgtgcccagctgagattccttaaagaactaaaagtagaaccaccatctgatcctgcaatatcactactgggtatctactcaggggaaaagaagtaattattcgaaaaagatacttgcatacacatgtttatagcagcaaaattcacaattggaaaattgtggaaccaacccaaatgcccatcaatcaacgagtggaaaaagaaactgatatatatatatacatatgcatatatgagatatatatgtatgatggaatactacacagccatgaaaaggaatgaattagcagcatttgcagtgacctggatgagactggagactattattctaagtgacgtaactcaagaatgggaaaccaaacatcgtgtgttctcactgatctgtgggagctaagctatgaggacgcaaaggcataagaatgatacaatggactacgggacttgggaggaggcatgggagggggcgagggataaaagattacaagtatggtgcagtgtatacttcttgggaagtgggtgaaccaaaatctcacaaatcactactaaagaacctaatcatgtagccaataccaccagtacttcaaaacttatggaaaaataaaataaaaacctccaaggaactagctgtaggtgggatattggctgtatctcagttccagctccaggaagaagacagatcattgggaacaagaaccctgctgattaaacaatagctgcctaatacggcagcaacacagggtactccaaacttgcttggataattttgtccttttaaaatgtacaattctacttcttaatacaatgcagacaactccatctactttatctagtcataataaaatgaaaatgacttttactcttcgaatacttaaaacttgttcaaagattctttcacatttacttcttttgattcttacaaaagaagggaagacattttatagatgaggaaaccaagatagcacaagacaaatgacttttaaaaaattgtgtaactgaatactgacagcactaggattagaaactgcaaaaatactaatgccagtgtcatttatactacaacaaaccatgggaaaaggaagaggtacagaaaaatatctgcgctcagaagtaggttgcttgcttcttgagatatttcaaaagacaagtgatgagctagtcagcctgtggaactattctacacgtttgtaatcagaacaatttcttttcagggtataatacaccagttctaataatgggtattatgattttaatagctatgtgcttcacaaaatgcagttcaggaaaatggctaagaatatctgaatccatcataaactaggcaattttccctgggataacagtgatagaaatgtttcattatctctcgttctaaatacatgtaaggattaaatccaactacattgttatagcaaaattaatatactgtgtttataacagacacaatttttcaccccctcccattaagatatatgtgaaaatacatatgtggctttaattagcagattataacattctgttccacgcagttagatacatagcacctgtgtcttaaagaataatgaatatattctccaaaatctattcatctatgggtaatgtttccatcactcacactttcgtttacatataaagtgatggagacatcaaggacacatggtctcac

SEQ ID NO: 1432 - DNA, 1047 bp, Homo sapiens
ttctccccgccccccagttgttgtcgaagtctgggggttgggactggaccccctgattgcgtaagagcaaaaagcgaaggcgcaatctggacactgggagattcggagcgcagggagtttgagagaaacttttattttgaagagaccaaggttgagggggggcttatttcctgacagctatttacttagagcaaatgattagttttagaaggatggactataacattgaatcaattacaaaacgcggtttttgagcccattactgttggagctacagggagagaaacagaggaggagactgcaagagatcattggaggccgtgggcacgctctttactccatgtgtgggacattcattgcggaataacatcggaggagaagtttcccagagctatggggacttcccatccggcgttcctggtcttaggctgtcttctcacagggctgagcctaatcctctgccagctttcattaccctctatccttccaaatgaaaatgaaaaggttgtgcagctgaattcatccttttctctgagatgctttggggagagtgaagtgagctggcagtaccccatgtctgaagaagagagctccgatgtggaaatcagaaatgaagaaaacaacagcggcctttttgtgacggtcttggaagtgagcagtgcctcggcggcccacacagggttgtacacttgctattacaaccacactcagacagaagagaatgagcttgaaggcaggcacatttacatctatgtgccagacccagatgtagcctttgtacctctaggaatgacggattatttagtcatcgtggaggatgatgattctgccattataccttgtcgcacaactgatcccgagactcctgtaaccttacacaacagtgagggggtggtacctgcctcctacgacagcagacagggctttaatgggaccttcactgtagggccctatatctgtgaggccaccgtcaaaggaaagaagttccagaccatcccatttaatgtttatgctttaaaaggtacttgtatcatctccttccttctt

SEQ ID NO: 1433 - protein, 216 aa, Homo sapiens
MGTSHPAFLVLGCLLTGLSLILCQLSLPSILPNENEKVVQLNSSFSLRCFGESEVSWQYPMSEEESSDVEIRNEENNSGLFVTVLEVSSASAAHTGTCYYNHTQTEENELEGRHIYIYVPDPDVAFVPLGMTDYLVIVEDDDSAIIPCRTTDPETPVTLHNSEGVVPASYDSRQGFNGTFTVGPYICEATVKGKKFQTIPFNVYALKGTCIISFLL

SEQ ID NO: 1434 - DNA, 6633 bp, Homo sapiens
ttctccccgccccccagttgttgtcgaagtctgggggttgggactggaccccctgattgcgtaagagcaaaaagcgaaggcgcaatctggacactgggagattcggagcgcagggagtttgagagaaacttttattttgaagagaccaaggttgagggggggcttatttcctgacagctatttacttagagcaaatgattagttttagaaggatggactataacattgaatcaattacaaaacgcggtttttgagcccattactgttggagctacagggagagaaacagaggaggagactgcaagagatcattggaggccgtgggcacgctctttactccatgtgtgggacattcattgcggaataacatcggaggagaagtttcccagagctatggggacttcccatccggcgttcctggtcttaggctgtcttctcacagggctgagcctaatcctctgccagctttcattaccctctatccttccaaatgaaaatgaaaaggttgtgcagctgaattcatccttttctctgagatgctttggggagagtgaagtgagctggcagtaccccatgtctgaagaagagagctccgatgtggaaatcagaaatgaagaaaacaacagcggcctttttgtgacggtcttggaagtgagcagtgcctcggcggcccacacagggttgtacacttgctattacaaccacactcagacagaagagaatgagcttgaaggcaggcacatttacatctatgtgccagacccagatgtagcctttgtacctctaggaatgacggattatttagtcatcgtggaggatgatgattctgccattataccttgtcgcacaactgatcccgagactcctgtaaccttacacaacagtgagggggtggtacctgcctcctacgacagcagacagggctttaatgggaccttcactgtagggccctatatctgtgaggccaccgtcaaaggaaagaagttccagaccatcccatttaatgtttatgctttaaaagcaacatcagagctggatctagaaatggaagctcttaaaaccgtgtataagtcaggggaaacgattgtggtcacctgtgctgtttttaacaatgaggtggttgaccttcaatggacttaccctggagaagtgaaaggcaaaggcatcacaatgctggaagaaatcaaagtcccatccatcaaattggtgtacactttgacggtccccgaggccacggtgaaagacagtggagattacgaatgtgctgcccgccaggctaccagggaggtcaaagaaatgaagaaagtcactatttctgtccatgagaaaggtttcattgaaatcaaacccaccttcagccagttggaagctgtcaacctgcatgaagtcaaacattttgttgtagaggtgcgggcctacccacctcccaggatatcctggctgaaaaacaatctgactctgattgaaaatctcactgagatcaccactgatgtggaaaagattcaggaaataaggtatcgaagcaaattaaagctgatccgtgctaaggaagaagacagtggccattatactattgtagctcaaaatgaagatgctgtgaagagctatacttttgaactgttaactcaagttccttcatccattctggacttggtcgatgatcaccatggctcaactgggggacagacggtgaggtgcacagctgaaggcacgccgcttcctgatattgagtggatgatatgcaaagatattaagaaatgtaataatgaaacttcctggactattttggccaacaatgtctcaaacatcatcacggagatccactcccgagacaggagtaccgtggagggccgtgtgactttcgccaaagtggaggagaccatcgccgtgcgatgcctggctaagaatctccttggagctgagaaccgagagctgaagctggtggctcccaccctgcgttctgaactcacggtggctgctgcagtcctggtgctgttggtgattgtgatcatctcacttattgtcctggttgtcatttggaaacagaaaccgaggtatgaaattcgctggagggtcattgaatcaatcagcccggatggacatgaatatatttatgtggacccgatgcagctgccttatgactcaagatgggagtttccaagagatggactagtgcttggtcgggtcttggggtctggagcgtttgggaaggtggttgaaggaacagcctatggattaagccggtcccaacctgtcatgaaagttgcagtgaagatgctaaaacccacggccagatccagtgaaaaacaagctctcatgtctgaactgaagataatgactcacctggggccacatttgaacattgtaaacttgctgggagcctgcaccaagtcaggccccatttacatcatcacagagtattgcttctatggagatttggtcaactatttgcataagaatagggatagcttcctgagccaccacccagagaagccaaagaaagagctggatatctttggattgaaccctgctgatgaaagcacacggagctatgttattttatcttttgaaaacaatggtgactacatggacatgaagcaggctgatactacacagtatgtccccatgctagaaaggaaagaggtttctaaatattccgacatccagagatcactctatgatcgtccagcctcatataagaagaaatctatgttagactcagaagtcaaaaacctcctttcagatgataactcagaaggccttactttattggatttgttgagcttcacctatcaagttgcccgaggaatggagtttttggcttcaaaaaattgtgtccaccgtgatctggctgctcgcaacgtcctcctggcacaaggaaaaattgtgaagatctgtgactttggcctggccagagacatcatgcatgattcgaactatgtgtcgaaaggcagtacctttctgcccgtgaagtggatggctcctgagagcatctttgacaacctctacaccacactgagtgatgtctggtcttatggcattctgctctgggagatcttttcccttggtggcaccccttaccccggcatgatggtggattctactttctacaataagatcaagagtgggtaccggatggccaagcctgaccacgctaccagtgaagtctacgagatcatggtgaaatgctggaacagtgagccggagaagagaccctccttttaccacctgagtgagattgtggagaatctgctgcctggacaatataaaaagagttatgaaaaaattcacctggacttcctgaagagtgaccatcctgctgtggcacgcatgcgtgtggactcagacaatgcatacattggtgtcacctacaaaaacgaggaagacaagctgaaggactgggagggtggtctggatgagcagagactgagcgctgacagtggctacatcattcctctgcctgacattgaccctgtccctgaggaggaggacctgggcaagaggaacagacacagctcgcagacctctgaagagagtgccattgagacgggttccagcagttccaccttcatcaagagagaggacgagaccattgaagacatcgacatgatggacgacatcggcatagactcttcagacctggtggaagacagcttcctgtaactggcggattcgaggggttccttccacttctggggccacctctggatcccgttcagaaaaccactttattgcaatgcggaggttgagaggaggacttggttgatgtttaaagagaagttcccagccaagggcctcggggagcgttctaaatatgaatgaatgggatattttgaaatgaactttgtcagtgttgcctcttgcaatgcctcagtagcatctcagtggtgtgtgaagtttggagatagatggataagggaataataggccacagaaggtgaactttgtgcttcaaggacattggtgagagtccaacagacacaatttatactgcgacagaacttcagcattgtaattatgtaaataactctaaccaaggctgtgtttagattgtattaactatcttctttggacttctgaagagaccactcaatccatccatgtacttccctcttgaaacctgatgtcagctgctgttgaactttttaaagaagtgcatgaaaaaccatttttgaaccttaaaaggtactggtactatagcattttgctatcttttttagtgttaaagagataaagaataataattaaccaaccttgtttaatagatttgggtcatttagaagcctgacaactcattttcatattgtaatctatgtttataatactactactgttatcagtaatgctaaatgtgtaataatgtaacatgatttccctccagagaaagcacaatttaaaacaatccttactaagtaggtgatgagtttgacagtttttgacatttatattaaataacatgtttctctataaagtatggtaatagctttagtgaattaaatttagttgagcatagagaacaaagtaaaagtagtgttgtccaggaagtcagaatttttaactgtactgaataggttccccaatccatcgtattaaaaaacaattaactgccctctgaaataatgggattagaaacaaacaaaactcttaagtcctaaaagttctcaatgtagaggcataaacctgtgctgaacataacttctcatgtatattacccaatggaaaatataatgatcagcaaaaagactggatttgcagaagtttttttttttttcttcatgcctgatgaaagctttggcgaccccaatatatgtattttttgaatctatgaacctgaaaagggtcagaaggatgcccagacatcagcctccttctttcaccccttaccccaaagagaaagagtttgaaactcgagaccataaagatattctttagtggaggctggatgtgcattagcctggatcctcagttctcaaatgtgtgtggcagccaggatgactagatcctgggtttccatccttgagattctgaagtatgaagtctgagggaaaccagagtctgtatttttctaaactccctggctgttctgatcggccagttttcggaaacactgacttaggtttcaggaagttgccatgggaaacaaataatttgaactttggaacagggttggaattcaaccacgcaggaagcctactatttaaatccttggcttcaggttagtgacatttaatgccatctagctagcaattgcgaccttaatttaactttccagtcttagctgaggctgagaaagctaaagtttggttttgacaggttttccaaaagtaaagatgctacttcccactgtatgggggagattgaactttccccgtctcccgtcttctgcctcccactccataccccgccaaggaaaggcatgtacaaaaattatgcaattcagtgttccaagtctctgtgtaaccagctcagtgttttggtggaaaaaacattttaagttttactgataatttgaggttagatgggaggatgaattgtcacatctatccacactgtcaaacaggttggtgtgggttcattggcattctttgcaatactgcttaattgctgataccatatgaatgaaacatgggctgtgattactgcaatcactgtgctatcggcagatgatgctttggaagatgcagaagcaataataaagtacttgactacctactggtgtaatctcaatgcaagccccaactttcttatccaactttttcatagtaagtgcgaagactgagccagattggccaattaaaaacgaaaacctgactaggttctgtagagccaattagacttgaaatacgtttgtgtttctagaatcacagctcaagcattctgtttatcgctcactctcccttgtacagccttattttgttggtgctttgcattttgatattgctgtgagccttgcatgacatcatgaggccggatgaaacttctcagtccagcagtttccagtcctaacaaatgctcccacctgaatttgtatatgactgcatttgtgggtgtgtgtgtgttttcagcaaattccagatttgtttccttttggcctcctgcaaagtctccagaagaaaatttgccaatctttcctactttctatttttatgatgacaatcaaagccggcctgagaaacactatttgtgactttttaaacgattagtgatgtccttaaaatgtggtctgccaatctgtacaaaatggtcctatttttgtgaagagggacataagataaaatgatgttatacatcaatatgtatatatgtatttctatatagacttggagaatactgccaaaacatttatgacaagctgtatcactgccttcgtttatatttttttaactgtgataatccccacaggcacattaactgttgcacttttgaatgtccaaaatttatattttagaaataataaaaagaaagatacttacatgttcccaaaacaatggtgtggtgaatgtgtgagaaaaactaacttgatagggtctaccaatacaaaatgtattacgaatgcccctgttcatgtttttgttttaaaacgtgtaaatgaagatctttatatttcaataaatgatatataatttaaagtta

SEQ ID NO: 1435 - protein, 1083 aa, Homo sapiens
MGTSHPAFLVLGCLLTGLSLILCQLSLPSILPNENEKVVQLNSSFSLRCFGESEVSWQYPMSEEESSDVEIRNEENNSGLFVTVLEVSSASAAHTGTCYYNHTQTEENELEGRHIYIYVPDPDVAFVPLGMTDYLVIVEDDDSAIIPCRTTDPETPVTLHNSEGVVPASYDSRQGFNGTFTVGPYICEATVKGKKFQTIPFNVYALKATSELDLEMEALKTVYKSGETIVVTCAVFNNEVVDLQWTYPGEVKGKGITMLEEIKVPSIKLVYTLTVPEATVKDSGDYECAARQATREVKEMKKVTISVHEKGFIEIKPTFSQLEAVNLHEVKHFVVEVRAYPPPRISWLKNNLTLIENLTEITTDVEKIQEIRYRSKLKLIRAKEEDSGHYTIVAQNEDAVKSYTFELLTQVPSSILDLVDDHHGSTGGQTVRCTAEGTPLPDIEWMICKDIKKCNNETSWTILANNVSNIITEIHSRDRSTVEGRVTFAKVEETIAVRCLAKNLLGAENRELKLVAPTLRSELTVAAAVLVLLVIVIISLIVLVVIWKQKPRYEIRWRVIESISPDGHEYIYVDPMQLPYDSRWEFPRDGLVLGRVLGSGAFGKVVEGTAYGLSRSQPVMKVAVKMLKPTARSSEKQALMSELKIMTHLGPHLNIVNLLGACTKSGPIYIITEYCFYGDLVNYLHKNRDSFLSHHPEKPKKELDIFQPADESTRSYVILSFENNGDYMDMKQADTTQYVPMLERKEVSKYSDIQRSLYDRPASYKKKSMLDSEVKNLLSDDNSEGLTLLDLLSFTYQVRMEFLASKNCVHRDLAARNVLLAQGKIVKICDFGLARDIMHDSNYVSKGSTFLPVKWMAPESIFDNLYTTLSDVWSYGILLWEIFSLGGTPYPGMMVDSTFYNKIKSGYRMAKPDHATSEVYEIMVKCWNSEPEKRPSFYHLSEIVENLLPGQYKKSYEKIHLDFLKSDHPAVARMRVDSDNAYIGVTYKNEEDKLKDWEGGLDEQRLSADSGYIIPLPDIDPVPEEEDLGKRNRHSSQTSEESAIETGSSSSTFIKREDETIEDIDMMDDIGIDSSDLVEDSFL

SEQ ID NO: 1436 - DNA, 24261 bp, Mus musculus
tacactcccatgttgccctcacgcagcctggctaggctggacctaggacccctttctctatgacacatctggttaccctcagttttctctatgacacatctggttaccctcagtggccagaggtctcagagctgaggccattccagatacccgagactcatcttctccctcccaagtaggaacgagtaaagtaaccctttccccactcttaagccccagagacaccctaggcaactggaaatgagcctttaaggcttggtaagggcattcatagcccctcccaagaggttcttgatctacatctgccctccatgaccctctgagacccactcattcttcccagaagcctctaggtctattattgtctgtccataagcctcttgggaatctttcatctgtcctgagcctagggccttaaacctcccttctcaaaatacttaagaggattccccttatctccccaaggagcctaaaaacttcctcccctttatattctctatatccttagctgtcttctcataaagccatatggcttcctttgtcttttgcaggagcgtctatttttttcttaattattatttatttatttaatatacatgagtacactgtagcagtcttcagacacaccagaagagggcatcagatcccattagagatggttgtatgccaccatgtggttgctgggaaccgaattcaggaccactggaagagcagtcagtgctcttaactgctgagccatctctccagccagcccccttgcaggagcctctagttctgcaaccgccttcccatgatgctctggacccacatgcccttctagtcgcctctgggccttacatctgccttcccatgagtctcagcgactcatgttcacacttaggagccattattcccatgtacatagcacacaccttttcagagatgaggtagaggaggccctaagcatagaaggggtcatgcccacctagaccctaaacagcaaagcacagccagtgctagacttcaaagctacatggttccagaatccatgtccaaaatgagtacaggtgggagggaagagggaagtccgggagacacagagtactcactctggaacattccatggtggcccagagctccctgaccagaactggaaaagctcagtggcctagagaggagacacggatgagggtcagacatcccctgtggccattacagccccatccttccatcccagattctccacagcccccaacccaagccacctgagggccagaagggcccagcttggcctggagggaaggggcggagatgagctgtgccgaagacatggtggccatcgtctggaaggccttgtccttggagacttggtcctgaggaatggttgagattcaggttagtggggagttctaattaagttctaattaagatagccagggtgggatgaagacatggggagccgtgatacagggtcagggaggggtcagctccccacccaaaccttctgtctctgctggcctcctctggaagggcagtgtgtgaggtacagatgtgggaagatgggcagggggactcagcacattcagagtctgacccagggtgggggaaggggccaagggaagaaagaaaacaccttaggaactgcaggttctacttcatctccctgagcaccagatgaccaccctgaggcagcgagagactagggctacccatggaacaggtcacacctcagcctcagagaagaaaggtttgcacgcccacaataagacgcttatggttttctaagtcaagaaaagcctggacacagcgtttcctgatgcccagggaacaggaagggagactttccagatgcccccggggacaggaaggggtgtttttattccagacagaacatagaaaagactgagaaaggaaagaaaagatcagaacctaagggtttcaggcctacaaaaaaggaagggaccatttccaaataaaagaacaggaagtctcattcctgaagctaaaaggaaagcaaccccacagagggccagtgacacgggttcaggcttgagggcacagggactcatggtagagaaaagagagtagatgacaatactttctcataggaaagtgcacagccaagggaggcgaggatggagtgggggacaggaaaagatcagcagggacaggggagggaaggatgggagcagagagagcaacctgtttgctacagcagccacatgacctctgcttgatgagcaggccagcacctgcaggcaggctgcctcccctggggtctctgaccctccagacctttctctctctctgtctggatttccttcactggtgtgtgtgtgtgtgtgtgtgtgtgtgtgtgtgtgtgtgtgtgtgtatttcaccaactctctgtctctgtctggccccacttcccatgtatgtgtctttctctctgggttgtgtaccctcctctatcaaaatctctctctctctctctctctggcctccccatctgtctgagtctgtctgtctgtctctgggtctgtccctctttccccatccctccctctaagcatcccactcagcctcccctgccaacgccctcccacctgcctttaccctcaccttcagcttggactgaatttctctcgatttccttcgagccaaaacctgaatatggctggagacctggagggatgagaagcaggtctgagcatccttcatcaactgccctcccttcccccggaggccgcacacgctgctcttccacaggtcacacagcatgaaatcaaaggctgtctaaagtgtaagcctccaggcccaggcccctctttgtaataaacctacagaaatcagaccgacaagacggctcagcagtaagagcacttagcaccaagcctagttccaaaggtccatccctgagacccacatggtggatggagagcaccaactcctgaatgttgtcttctgatttctacatgtatagtatgtctcaaggacacacacatacacacaccacacacacacaccacataattttctttaaaaagtacttaaaattttttgtgatatattttatgtatgtggattaggtgcatcatggtgcacacacagaggtcagagggaaagttgtgggagctgggtctcctaccatgggggccccagaaactagctgagctaaggtaatcaggcttagcaacaagccctttacccactatgccatttcacgggcacaaaatgtaaacattttaccgaaatatccggcatccccacaacttagagaaaaaccacacaacaaggccagaaagacgatggttcagtcagtgaagcttgccctccctgcatgaggactttagttcttcagtccttgtatactcaatcccggcactaggagacacagataggtgcagactggcacttgctggctacccagtctagtcaaatccgccagttccaggccagtgagagagccagtctcaaagaagtgggcagctgctgagatgaaaccggggtctcccactgacctccgcatgctggcgcatgcacacgcatgtagaggggcctcctacactcacatatacatacgaaccacatcatcagccttgaacctgacccagcccacatgaagatggccctcaggtaatgcccagccccagaccaaagttccaaagtgtcactcctgagacctgctttcgcgttctcgtcttccctgtcctcagcttgatgtaacgggcaatgagttcgttccggcctggaggagtcaaaatggaaaagagtaagactctcagcagaacttcctgccagagaagacagggctgagggataaggtcagcaagccaccaatccccaccaaactacagtcaagccaggctgggggacacctcagccacagggtcagcagctcagccgtgttctagctatgtggccatggacggatcacttagtcttcctgtgcctcagtttccctcatctgtgcaggaaaaaaaaatgctagcgcctaagtcatgggaaggacacaatcctttttcttcgttttgtattttgtttattttcatatctactcatttatttttgtttatttatttttggctttttgggacagggtctctctacatagccctggctgtcctggaactccctctatgtagaccacactggctttgaattcacagatatccacccacctgcctctgccacctgccttatttttattattttgagataaggtcttactaggccaggctagcacagagctcagtatgtagctgagaatggccttgaactgttcaggtgtgtgccaccacagttggccagactctggacacttgggttagtgtgacttttctccctggggtcaggacagccaccacaggggactcaccatacatcttgccctcatctgacaggatgatcttgcgacggccacagggagggtagatggccagggcctcctgaaaactctgctcaatgtcggggctccacacaccttctgcatcagggctgccatcacctccaacgccctcgctgcctccggtgccctcttcgctgccttcctcgctacctgtccagcccccgccatcatccaggggggccccagtccggggatcccccatctgggcctgcagagatgaagatcagcagctacatatggtattgcaagaacaggcaggagcactgcctgagagagaaagccaggcctgaacctgaacccctgggtctgagggaaaaagaggaacctaagcctgggacctgggaggctgttcttccagtgaggaatttgcattgggactgcatggggttgaagccacctgaccaactcaggtgcagtgcctgaggctgtgtttggatttagggaagaccagagtctcgttaattggcaggagtgagactctcctgtcccactaagaaagaacaggtgctcagagaagggcagcagctgctggagaagcagaggctaagtccaaaaccaacacccagagagaaggggacagagagatccagggacaaaaatccagatcgacacagcaaaagggggcatagtcagggcccagaccagaaagtaaccacagaatcaggcgggggcggggctgggtgcccatcaaacttcaggccttgggactcagtcgcccagccatctggaggacagaacaaagagcccaggcatcccctcccccagttccccacaacccctgctgtgggcgaggccagcatgcgagcagcggccccgcccctcccccgggctcggttccagcccaagttcccatcgactttccggaggccaagaacagggaaaactttccccatacagtcagatacctcctccctagaggttttatgttatccagaactcccaggaccccaaagttctgagtcccatccctccaattttggactcttgacctggtagagagaggttaggtgaacaaagatctcaagcccagcccagtgtcgcgacgacgttcaggacccccacaggccgaaatcccaacccagcccacccccatgtggccagacaaagagacagacgagccaggcaagacagacggacatctctaatctcctgacccagtcaccaatcctcggaagaccaatggccgaaggtccaaggggccctatggctctcccttggccactcccgctcctgccctgctccgtgtgggggccacatgcccacagggcggatacttgcacgaaggatggcccaggggtcgaactaacagaagacccgtggtcgctccttcgctcccacatccgcagcccccggccaccccgcgcgctcccccagccgcagaccatccccaggcccctaactccggagaaagttccagctccacacttcggctgcgtcccccgcgcaaactccggccccggggcagaaaagggctccgggcagttcccacgcgatctcaggaacacgcgcctcacctcatcgcgcggaacttcccaccccaactcacaaaccccaagcaggatcccgattcccgccggcgccttcctacctcccggcctgggcaggggagccgcgggcgggcggggcgagacccagagaaagttgccgggagctttgtttgggaaaagtgggagggaccgggggggggggcgggcccggcggtaggcttggaatctcacagggacactcgctgcgaggtgcttgctttaggagagatgagtccatctaaggactgggtagggttgctggggtccctaggagagaaggtggttatgggggcctggattcatgactttagaggaggaggctggggtttgtaactctgggtcttaaagaagaatattgggatctggaccctgggtctgaagaagaaggtactgggagttgaagggagtagactcccagatagaagaggagacatgacctgggtcaccctgggtgtttgctgaggatgtgggattgacagatacaaaataatctttaccaaacttatgtgggttttttaaaaaagattttatttattttcttaatgtgagtacattgtagctgtacagatggttgtgagccttcatgtggttgttgggaattgtttttaggactgctgctcactccggtctgctctgttcggccccactcactcagtccctgcttgcttcaccccaaagatttctttattattacacataagtacactgtagctgacttaagacacactagaagagggcgtcagatctcattacaggtggttgtgagccaccatgtggttgctgggatttgaactcaggaccttctgaagagcagtcagtgctattacctgctgagccagcccattttgtgtttttattttactctgttttttaacgtttacattttatctgtatgttttgtctgcatgtatacctacagaggccagaagagggcactgggcactggatcccctggaactggagttacagatggttgtggtcaaccatgtgggtgctgtaagtcaaatccaggtcctctggaagagcaggcagtgctctcaatccctgagccatctccagccatgtatacttgtgtgtgtatagaagtgtgggtgtggggcgtggtagcacatgcctttaatcccagcacttgggaggcagaggcaggaggatttctgagttcgaggccagcctggtctacagagtgagttccaggacagccagggctacacagagaaaccctgtctcgaaaaaccaaaaaaaaaaaaaaaaaaaaaaaaaagaagaagaagtgtgggtgtgggtgtgtaaaagtggagatgaaggtcagaacccgggacctcacaagggctaggcagaagttccagctcagagctgtatctggtccaaccagtttctgtgtgataagtaaagtgctggggtgggttggtttgcttctgatgagaacacagcttccttgtgacctggccagagtgaagcctgttgggctggaccccctgcgtttctgaagatccacagaagtgcagactccacaactgcttaggcactagtggctgcaagtggctcctatcccacttagaggcagagcctggctgcctgagggcagagagttggaacccagggttttgttctcttcaaactgaaggtctgggtaagagtgatatcactgagttacagtcccagctcctgtggagttgaagctagccagggtgttctagtttgttttctattactgtgataaacaccatgaccaaaagttggggaggaaagggttaatttaagattgccattgtgatccatcaccaaatcaccaggaaaggaacctggaggcgaggcaggagctgaagcagagaccttggagaagccctcctcaccggctcgctcagccttatagcgcctaggaacactggcccaggggcgaaaccacccacagtcagctggcccctccaacagcaatcattaaatctctgccctcaggcacccaggctctgtttatcctgggacaggggccatttctgtggaccttcagaaacactgggagtccaggtcaataggcttcctgctggccaggtcacaaggccctgcagacttgcctataggccaatctgatagggatattttttcaactgaagttccctcttcccagatgactctggctcttgtcaagttgacaataaaaaaaaaaacaaaaaaccaaaaccaccaccaacaacaaaaactaaccagcacactgaaatacaaacatcctttgagaaaacagacaaaatccccccagccagccagccaggtaatggtggcataggccttaatctcagcactcaggaagcagaggcaggtggaccgttgactctgaggctcctggtctacagagtgagttccgggacagccagggctacacggagaaaccctgtctcaaaaaaagaaaaagaaaggaagcaagcaagcaagaaaatggctatgagctggacagatggctcaaggaaaagaacttactgccaaccctgacaacttgaattcaatgtccagatctctctctctctctctctctctctctctctctctctctctcacacacacacacacacacacacacacaggtcacactgctcagcatagttcaaggccagtctgggatgcataagaccctatttctaaatttaaaaagcaaaaatatgagaaaaagaggaaaaagaagcgctggctgtcttcaaactcaaagccaagagtcgctggcatatgggctctgtgagtctgaaagggaagcttagacttgggatttcttgggaaatataacacagggctgtaattaggggttttttggaggtagctgggttttttaaatgaaatcatccggaaaacgagaaacatctacagtaatgctcggagagtcaataaatgagggtaaaccagatggcggagtgctgaaggcacttgcagccaagcttgagttcgatccaggggacctacacggtggcaggtaagcagcaactcctgacagttgttcactaccaggcatggtggcgcacgcctttaatcccagcacttgagaggcagaggcaggtggatttctgggttcaaggccagcctggtctacagagtgagttccaggacagccagggctacacagagaaaccctgtatcaaaaaaccaaaaaaaaaaaaaaaaaaaaaaaaaggttgttcactgacctccacatctgcgccatggcagttctgtgtgccaacactccgaataaataaaattaaatgaatgatcttagacccagatatgggtgaacagggatccaaggagttctggaatacagaggcgtgacctgggtggagcattgctctagtttaaagggcgtggccatctgtgatggatggttgactcccttgggagagttaggatcagagaacagtagacagagaacaatagggttccggagctgaggccaatgataagtccaggtaatagaggctggaggataagatcatcaagtggaagcgtggttatagaataggagcgtaatcaggagaggacctagtggtcagacttaagggaagtaggtagtgaagaatggaggtcatgaagaagcatgcgcacgggaggaatgtttatccctgggcacatcaactccgggcaaaggcagggagacaggtggctgtggcttaaagcacaagcttgtgccttccagagagatccggggagaatttaggtaggtcagtgggcggaggcgtggtcaggaaaaagagggcgtgtccctttgatgagtcatagccaaagaggaaaatctttcttaaaagacgttgttgccgaaaagaagggtggctctcaggcaccaggtaaaataaatgcctgttttatgagtaaggtcaccaggtgtagacgtggccatccacgaggagtatggcttaagaggtgtggtcagtcaacaatacagatgtggatatgccagagacccgatggtggagtagtgaggatcctaggcgaccgtgtgtggagggcgtggtgagacaattagggcgtggccagtctcgcggagccctgacacccaacgaacgctccagtaatttgcccaggctcgagaccagaactggatattaactgtccgtatccggcggtgtccggagccgggtgaccgggtgtccagcagaaggcgcgaatgaaggcaaaggtaaggtactggatctgagtgaggctaaacccggataaggggcgcctgaaatggagagaacgcctacagaatccagggggatgcagggcaggtgggcggggcggagcgggtccctcacctagggtcggagcctggaaagagccgacaaggggtgattgtgggatctgaaactgcccttgtcacagcctcccacccacctgcaatgtgtcgactgagggtcttgctgctgctgctccccttggccttcgtgtcctcctctgctctccccatccatgatgtcgactctcagcagaacacctccgggttcctgggccttcagaggcttctccaaagctttagtcgactgttcctaaaagtgagtgatgggacagagacatgaaccaggcagaaggcagataagaaaaggagcaaacagaacagagagagttggagataagtcttagatgggcgagtggttgtctagcatgtacgaagccctgggcctgacgtcctgcaacaattacaccagcactcaggaggtgcaggccggaggaacaggagtgggaagccaccttcccctacacaggaagtttgaggtcagccaggaatacgcgagattttgtgtcgcagaaaagcaggtgttgggttgaacagatagttgggggacatgacaacacaaaataggaagagaagccggacctgtgattgaaagcctgtcatcccagctagcaggtcccagatgtggctaaggctcccatgaaatcccaacatgagaaagaaaaaaaaaaaaaaaagaaagaaaagaaaaacaagttcaaggtcagcctaggcagctttcatcaaaccctgttggaaaacataaaaagaggcaggcctggcaacccatgcacttgggaggtaagagacagggcaatgtctggatttgaggccagcttgccctgcatatcgagttccgggtcagccagagctacatacatagtaagacccagtcagaataaatcaataaaaagaggggttatagtggctgagggtgtgactcagaggtagagcccccaagccgggaggctgagggtgtggttagagggtacggggcttacctagcatgtgtgggtgagagggagagagaaggggaaggagaggtggacgccaggacaggtgaggaacaggagcagcaaagcaatgggacaaaaagatggatggggtttagtggctagaggctctggggatcggtggaccgaatgggactgatttggagggcaccctggaaggacagcgggtgtgcacaccatttccctctggccctagaatgacctgctacgagacctggacaacttcttctcctcccccatggacttccgagaccttcctaggaacttccatcaggaagagaaccaggagcacagaatgggcaaccataccctctccagccacctacagatagacaaggtgcctccctccgcagggcagcccttcctgcgctctccccaccacccatcaggctgctttccctgacaggaggggcaggtgagggaggaaagcaggtttgttctgactctcttgtgcaaccctcacaggtgactgacaaccagacaggggaggtgctcatctcggagaaagtcgaggcctccattgagccagaacggaacccggaaggggactggaaggtaaggaccttccttgccccgaggtgtccaggaatcagcatttttctatagccattcaccctgtgccatactgttccagtttcctctctgctgctgtaatgaagtattttagcccaaaacatacaaggaaggaaagggtttatctggtttgcatcccatcacttagggaaactcatggcatcgtttctactctcaagagcaaacagagagaaaacatatttgcttgctttctcctgtcttaggtggttcaggatccattacttaggaaatggttccacccacaatgggctgggtcgtcctacatcataaccatcttgatctagttaataccccattcagactctcttctctgctgattctaagctgtgacaagattggcatttaagattagccagtatacactccatacatggaatatccttgagatttctggagctcagtgtaacgtgtcaaaagggagaggacaataggcatggttaaacaaacacagatgatccagtacttgaaaagctgagacaggagggttgccacgactttaggcaaaaggcagaaaggatctctgtgagttgaagaccagcctggtttacaaagcaagtcccagcccagtgggggctacatatcaggaccctgtgtcaaagcaaatataaatgtcagaaagcgttttggtcgttccagaaagttttaggctttcccaacagctttataaatcttagcattcaaaaactccaccaatcccagaaatctggcaggccagtaagcccccaggatcctccagcctggacctcgtgagtgtagccattacaagcatgacctgcagctccctgtcactctgtgaatgctggagtccagactcaagctctcagatttgggcacaagtaccttttgacagtcccctttctgagacagggtctcactatgtagccttgactagctctgaattgtcaatgtccctgcctcaacctacaggtagctgggaaaacatgcctgaaccatcaggcccaactgaaatcagggtaatttcagaacaggaatttggcataggcaaccaggaatggtgacacaccaggaatggtgacacaccaggaatggtgacacaccaggttttttgtttggctttactttggtttgggtggtttggtttaggttttggttttggttgttagagatgggatcactctctgtagccctggctatcctagaacttgctttgtagtccaggctgtcctccaactctaagatctgcctgcccctgcctcctaagtgagtttaaaggcctgcagtaccattcctggcaaaacttaaggcttttgactcagggtgatccaatacttggccacctcccaaatgcggggattctaaatgtgaaccatcgcaccaaatttatcatttgtttttgtttaatttttgttttgttttgttttgtttttttccaagatagtttttctatgtaaccctggctaccctcaaactcacagagaccctcctgcctctgcctcttgagtgtgggggagtaaaggcgtgcgtgcaccaccactgtccagcgaatgcttgctttcttgcttgctttctttctttctttcaaaaaaaaattttttttaatttttaaaaattgttagcacatgagtgcaggtacacacaatggccagaagagggcatcagattccccgagagctggacttaatggagcctgtgagatacttaccatggggtgttaggaatccaaagaatatcttctgcagagacactaataatgcatgtaaatggtgcacacactcaacgctcaggcacaccaggtaaacatagatgaaataatctcttaggcaaccgtggaagtttaaaaataatcaaattttggtgctggaaagatggctcagcagttaagagcactgactgctcttccaaaggatccaggttcaattcccagcatcaaagtggcagctcacaactgtctctacctccagttccagggatctggcaccccctcacagacacacatgcaggcaaaacacccatgcacatgaaaataaacaaatcttaaataataaatttaatacacaagaatgcagcaggccagacagaaaacagaactgtctgcctaaaaagggttttttaagcagcaagtgagctgtaatggaggttgagatggcccagtggagaccaaacatcttggatgcgctgtgcggcatctgaggagctccccgtgcctcattcccaggttcccaaagtagaagcaaaagagcccccggtgcctgtgcagaaggtcaccgacagcttgcacccagagccccggcaggtggctttctggatcatgaagatgccaaggcggaggacccagcccgatgtccaggatggaggccgctggctcatagaaaagcgacatcgcatgcaggccatccgggatgggctccgtggaggcgcccgtgaggacagcctggaggatggggtccatatcccccaacacgccaagctgcctgtcagaaagacacactttctctacatcctcaggccatcccaacagctgtaagtggggaccagatgtcccacaccctaccccaacaccatatggaaataaaggttttcttacatctagctcaatctccttttggtatctcttcccaaacaggccagaataacgactccatcctacacatacactcagtgctgacaatggctgtgccagctcttccttacatctcattcagaacatggcctcttggttgggcagctggatctcctgtagcaccatgatacacctggttccgaaaccattgatccaccctgtctgccatcccaagtctttaaagcacattgctgagccaccccagccaccaaaatatatattttttagattttacaaaattactcaagatctcacaaaagggaaagcaaatattgaaaaattaatattatgggggctggagagatggcttagcagttaagagcactggctgcccttccagaggtcctgagttcaattcccagaaaccacatggtagctcaccaccatctgtaatggtatctaatgccctcttctggtgtgtctgaagatagcaacaaggtattcatagacataaaataattcttttttaaaaagttattattttaaatttatatgtataaaaattttgttggcatgtgtgtctgtgcaccatatttgtgcctggagaccagaaaagggaatcagatctgctgggggtggagttatagaccctgtgagctgccacatgcgtggggcataaaaccatgccaggaaattcagttaggcatagcaagttcagacccagagactctgtgcacacctgaggcttaggcgactccctgctcccccaccccacccacagactcctgacttggaacacatgccatgcttcgcacataaatgtgtcaagctgggcatggtggcgcatgccattaatcccagcactcgggaggcaaaggcaggcggatttctgagtttgaggtatgattttacacatccattttccgccatgacaataaactgtttagaatcatagactgtctcttttcatcaagatctgctgtgggagccatgaagaaggccttcaccttcagagccacaacccactcccccatagaaggcttctctgcgctcccagtcacaacctccttcccttaccaagataaggacaataatccctgtgagactagctggagttccccttctcccccaacccctgccccaggctccaggctagatgctgtccccagacctcaggcccctgctcttccaggactcccagccgtgccaggatttccaagagtctgagaaccccacaaccctggccttgtcacaggcctgggaccccagaaggagctctggctttcccaccctgggagcaatgtcacttccttacagcccagcatccaccccagaggcagtatgggataagcccagtcaaactccctgcttctgtgtcctgagtggcctgcaatgtggatgctgggaatccatctcaggtgttctggaaaaacatccattgctcttaaacagtggtctatgtttccagccccaggaatggatgttgataatagggacaaagctaacagggtccagaatgcaccacaagttgtcctgaaaacacccggcagacctttcatctagaccaggcgtcctagtttgctttctactgctgcggtgcgtgagcaccacgatcaaaaacaacttggggtgagcaccatgatcaaaaacaacttggggagtctatttcatcttgtgatagatcacagtccatcacagagaagaggcagggtaggggctcgaaggaggaactgaagcttgctcagggttttgttttgttttttttcatacaacccagaagcaccttcccaggggtggtcttgcccacagtgggctgccatccacatcactcattaaccaagaaaatatccccacaggcttgcctactgacagggtaacttttcagttgaggttttcagatgactctggcttttgtcaaggcaacaaaaaactaaacagcacacacagggtctgatggtcagtaaggtgagaaagaccttgcactttttgcctctacctcccgagtactggtacactaccctgcccaattcactaggccctagggattgaatgagggcaccctcagtcaaacaccgtacccctgagctacatgcccagtccttatcattacatgcatgtgtttttaaacagcaaggggtaggaaagtgaacatgatagggtctgcatgtggaattcaggggccctccttgcaccatgtgggtcctggggattcttctcagatcgatcaccgggatgggtggcaagtgtctttactcttttttggtttggtttttttttttttttttttttggctttttcgagacagggtttctctgtgtagccctggctgacctggcactcactttgtagaccaggctggcctcgaactcagaaatctgcctgcctctgcctcccaagtgctgggattaaaggcgtgcaccaccacgcccggctgttggacccttaataataaaaaagttcgaatagtccacaggcatggactgaggcagggtgattgcttcaagtccgaagccatcctgggctacatagctaagcagtaagtagaaactataatagtttgggaaaacagcttgggtacctattaatgcggggggcgggggggggggagggaatggagcggaagtgaggctggaccagactgcgcatcattgtgacagtggcgggcgagccagacccaaaagaaagaacttggttcaaagactgacaagaagaaaaggatgaacagggagtccttcggttgaactctctcctgcttggccctattttgtcaagcagaaggaaaggatttttgtaccgcagaagaaagctgccgataatatcgcgccatcaccgctagccccactagtgcgcatgcactcgatcctcaggtccagcctatcctcccgagaagctctacgcatgcgccagctcaagggtcttcgtaaggagagacccgggcgccatccactcggagtgcgcttgcgtgagtacaagagcctgagagggcgggacttgcaggaggccggctcatttgcatttctggcgggaaaaggcgcgtgtgaacacgcctcttccgtgacattcgcaaccgccgttcgtcgctggtgtccctcaactgagtcccgactccaggtacgccctgcctgtggcgactttcatggcaggttccccggtaacatcacctgccagctccttcaaaaacgccccaagttttgagacaaggtttctctgtgtagccctggctgacctggaactcactctgtagaccaggctggcctcgaactccgaaatcctcctgcctctgcctcccgagcgctgggattaaaggcgtgcgccaccgtgaccggcttcctcaggaaaattctagtggcaacttcggcaatcctgtcagactcttgaaacttccggttgctttttgttgcttgttttctatttttgtttgagacagaccctccaagtgctgcccaggctggccacgacctcatgatcctcattccccagttttaggattacagctctcccagatgtgcccaactgcaatcttctagaacttttgaaacctaacacttaatctattttgtttttgtgggtagggtaggtgtttttgttttgagacagggtttctttgtgtagcattgactgtcctggaactctctctgtagaccaggctggcctgtgtgcttctggttcccacgtgctgggattaaaggtgtgcaccaccactgcctggcttttgtttgggtgtttttggtttttgttgttgttggggttttttgtttgtttgtttgtttttgagtattttgccggcatgtttgtatgtgtgtcaggtatgtgcctgtggagaccaggtggttttgtatccctctgaactaaaattgcagatgaggaggagttcacatgtgtgtagtgggattccaacccatatctatctggaagagtaaactgttagtcctcttaacgactaagctaccctccagggactctctagggcttcagtaaattgcccagactctactcaaaaccttggatcctgctgcctcagcctcctgagtgctggtatcacaggtgtagcccaccacgccagccgctaggatcttctagatatcccatcagagtctccctcaaaaacctgtcagagacttttcctctgaaatcttggtggagatttggtgttcaagtcctatctgatactttagaaatctgtagttgccctacaagttccgccggggactctgaaatctagtgacaccccagaaatgcagcccttgaattctagtccagggatcccctccagacttcctccatgtttaaaacccacaagacactcactggccacctgatatcccttgttcctcaagattttgtccgagtttccccttgaaagagtctcagaaagcctcttctttccctggtgccttctaaaagcctctgagatggacagcaggaggatccccactagctgaagaccagcctgctttacacagcttcagaaggcccactacagctaaagctacataatatatatttactaagtccctgtctccaaaagccagataataatgtctccagaaaacattcggctgccggaatacaggcaaggcagagtgatggctgcattccctgaggaaagggagagaggctgcttctctccccttcggtgacaaagatataggctggatcactccagattcaaaatagattaaggcgggcttacgaggaggcatcaacctccacccacctcacacgtggagatcagtgaagtcacacatccaggctaagcttagcaaaggtgttttataaagcttagacggggagtgataacgtgccagctaggggctgggattatgtccttacatggtcaaaagctgagaccccgggggcggggggggggggggttggcacttatgggtggatagctggaaagtggagaggagaggtgttagccccaagttttgtccttgtgggcagagttgaggggagaagagcaaaggaggtttcttagcttttgcaggggatgagcaggggttccaaacaaacaaaggggagccaagcaggaggaaacccaggctctctctacccttggccccagtccctagagggactactgacagtgcctccttttctcctgaaagtgactggccagtcgggcgtggtggccagcactagggaggcagaggcaggcagattggatttctgagttcgaggccagcctggtctacaaagtgagttccaggacagccagggctatacagagaaaccctgtctcagggaagaaaaaaaaaagtgactggccaggctgtaatagaggcaggacagcactgtcagggtgcagaggagggagtccctgtgaccacagaagcctgtgagagtcaagcccactcataaatataggccttgggagtgtctgtaaagatgtctcagtggtaaagagcactgagttcaattcccagcaaccacatggtggctcacaaccatctgtaatgggatctgatgccttcttctgtcatgcaggcatgcatgcaaatagagcactcatataaataaataaacaaacaaacaaataaataaattttatttttaaaaagggggagcagcatggagatggctggtggaggagaaaaacaacagagttgattttcaacagagaagagcctagagagaaggcccggtggttaagagaacttgctgtgtgtcagcgtgagggcacatgcctttagtcccagcaccctgaagcaggtggatctcttgagttcaaggctggtattcctggcaagtgttaggccagccagatctccagagagagactctttgtttggaaaagaaaagaataagaagccactgagacacttactacttttgcaaatgaccaagttttgattctcagatggcacatgccagctcacaaccttctctctccagttccaggtgctctgatgccctcttctgacctccaccacatcacaaaacacatttaaaaaaaaaaaaaaaaaagggtgagaagcaggcctggtgatggccatgcacattctttttttgtttgtttgttttgttttttggggttgttttgttttgttttgttttgttttgttttttcgagacagggtttctctgtgtagccctggctgtcctggaactcactctgtagaccaggctggcctcgaactcagaaatccgcctgcctctgcctcctgagtgctgggattaaaggcgtgcactaccaccgcccggcggccatgcacattcttgccaaggcaaagagatcacaaattcaaggccagcctggccatcttagggtggctttgtttccaaatacaaagagagccagagtgtgtagcttaacagtagaacacaggtattaatcattagtaagcagctgccctgggatttgatagtagagcacttgcctagaatctaccagtgaaagattgaaggtgactcagtgataaaagtgactggaagtagggaagagcactaggaggccagcagtctacagaggaccccatggtctgcctacaggcagggagggagcctgctgggctgtagtcagctccagatagagtgaaatgttccagagaacaagaggcaggaaggcaagagtcccaagcagagacatagtaggagcagcaggccactttaccaaatggcatgcaggttagatgactgctagacgatatagcatgatttggggagagaaagctgctggcccaggccacactgtgcctctgttgctagacccaagcaggctcggactcaaagaagccacagccacacaggtcaaatctgcagcctgtgggaatggactggaacctggcaggaagctaggacatgggccacagagaacaaggtgagcccgaggtcggactgtgaagagacccagaagagagcaagatggaatctctaggacaggaatggtgacttgttgggttatggggaagagaggtggcctcaagccctaggggcaacagttgaccccaccctcttgcctccccctttgatcttgctgctgcctgctctcttcagtcctcaggttgccatcccacacctcaaagccataaaaacaggttggagttgggatggggatggcaaacaggttctgagaaccctgagggcctcgggcagtgatggagcagtttagtcagccgagagtgtggccagtctgaggaagccatcactctgcttgtccttgtaggagctatctggacatcctttcttttccccaaccctcctcacagtggagggaagctgagagcttcgacagcagctgtagaggagcatcaggagtggtccatggacctgccggagggccaggctggtggtccaactgcacagagtaagtatctgcctgcaggaggaagagggagctgcgggtcaggctgggagcaggagagatgctagggtgggcagaggcaaaggatgctaggataagtgtcaattgtgtgcctgtcacatgtctgccctatctcctctctggagggctattgaggacagaaggctccacacactataacacccacacttcgcacctcttactttgggtaaaacaggtaccctgtcacctctatccctcctactgcacttgccttcccaacactggtgtctgtctagcacctgcttagtctaagactctccccggagcatggctgtacagaccctgctccactcgtgtgtgtgtgtgtgtgtgtgtgtgtgtgtgtgtgtgtgtgtttgtgtgtgtgtgtgcgcgcacgcacgcacccacacagtgcagaagagcagaagatggaatccaaggttttatgtgtgctaggcaaccagtcacttctgagttgtgatcccatctcccagtgttgtttttgttttatgagacaggatctggatttgaactctcactgatcctagctcagcctctcaagtgctgagatgacattcgtgtaccaccatgctcagctctcatatttaatttttaattttttaaaagagaaaagctgggtggcggtggtggtacgcacctttaatcccagcactcaaggaggcagaggcaggcagatctctgggtttgaggccaggctggtctataaagcctggtctataattctaggacagccagggctacatagagaaaccctatcttgagagagagagagaaagaatgcatagctggcagaggggtcacacctatagaactgaagggtctgagaaaataagaaagttggaggccaagtcaagcaggtggtgtaaatggtatgttaactgattttatgtaacttggttcatataccgactgtttgctgtgttaagcctcatggaaacatgccaagttattcctgtgttcacagacatccttgagaactaggatgtgccttacactaacagaacgctccgttccagcttggcctgcttacgtgcaggagaagaagcacgtgcagtgggcctctgcacactggtgctgctgccccagatcaatgcctgttttgctgtgggcagatgcagacaagtgggcgtgggagccagcgcgcatcagctttcggaggaaggtgctggctcactgactcctgtgggccagcctctatctctatgtccctaactcctgttttcttccccgccgatctgtctctgccctatctcagcaactcttttccccaagaatcaccctcctggtttctctgtctccatctcctgaggctgtgctaacagggaggccagcctgatggggtaggaagctccagcgtctatataggcagttccgactaatgcaggaacacctgtcttttaggctcctgggagtcgacaagtacgcctgcagctttgctcaaggctgagatctgcaccccaacctcaggggtagcctctgcaaataggaggggtttacaggcaagacaccagcatgctaataaggctggctagcttgggagatgactggcatctaaaccttgcctgcaccagcagagggcgagcagccaccaggaattaggaccatggccaggtcagcttctgagattgcagactgaaaaggaagaacacacccacaggggaaagccgaggctgaaagacagggatggcaaagaagagagaaggcgcttgggacagagtatcaagattaagatagagtacagggtggggggagaaaagggactgaaggacacaggacagaggctgaacatgtgagagaggttggggaaaaatgagaacaatggtccagaaagagcagggtggtggtcatgcacgcctttaaccacagcacatagaggcagaggcaggtgaatctctaaattcaaggccagcctggtctacggggtgagttccaggacagccaggatgccaggactacacggagaaaccctgtcttgaaaatccccccccccaaaaaaaaaaaaaaaaaggagagagagaaagggggggggggacggaacagtgtcttccttcaggacctcaggaagggactatgcaccattggcctttctgggccacagcacagagtcctcctctgtaacacgggacggtggagagcagtaggccagctgaagtcttctacctccccaaactaacctgccctactgccctcccatgggagccagaagagtccaggtcaaactggggtacagcatcctggaagtgtcagggtgagagaagagactctgtgctggaaggtgcctgtgaccgcttgtgctgcccgtctgcctcagactcctcgtgtagggataggagctgctgcggtgctgacgctccatgagtgcctgtagttacagaccacgcagaggcccacccacatgcatccatttcttccccaaaagggaggggggctttctcagaggatactgctgacactcagagggggtggggggcaggacaggggtctctagtgccagctcagactctaaccctgcagccatgtgcaatgggcactcatctcagcaggccaggctgtcagaggtatgaaagccacctccagcttggagaagctctgtttattgagtgcctgctgtattcatgtgatgtgaatatagctagctgcaggccaacagaccctggaaaacaggaacataggcaggcacacagtgggtctgagccag

SEQ ID NO: 1437 - DNA, 804 bp, Mus musculus
gtccagcagaaggcgcgaatgaaggcaaagcctcccacccacctgcaatgtgtcgactgagggtcttgctgctgctgctccccttggccttcgtgtcctcctctgctctccccatccatgatgtcgactctcagcagaacacctccgggttcctgggccttcagaggcttctccaaagctttagtcgactgttcctaaaaaatgacctgctacgagacctggacaacttcttctcctcccccatggacttccgagaccttcctaggaacttccatcaggaagagaaccaggagcacagaatgggcaaccataccctctccagccacctacagatagacaaggtgactgacaaccagacaggggaggtgctcatctcggagaaagtcgaggcctccattgagccagaacggaacccggaaggggactggaaggttcccaaagtagaagcaaaagagcccccggtgcctgtgcagaaggtcaccgacagcttgcacccagagccccggcaggtggctttctggatcatgaagatgccaaggcggaggacccagcccgatgtccaggatggaggccgctggctcatagaaaagcgacatcgcatgcaggccatccgggatgggctccgtggaggcgcccgtgaggacagcctggaggatggggtccatatcccccaacacgccaagctgcctgtcagaaagacacactttctctacatcctcaggccatcccaacagctgtaagtggggaccagatgtcccacaccctaccccaacaccatatggaaataaaggttttcttacatct

SEQ ID NO: 1438 - protein, 245 aa, Mus musculus
PAEGANEGKASHPPAMCRLRVLLLLLPLAFVSSSALPIHDVDSQQNTSGFLGLQRLLQSFSRLFLKNDLLRDLDNFFSSPMDFRDLPRNFHQEENQEHRMGNHTLSSHLQIDKVTDNQTGEVLISEKVEASIEPERNPEGDWKVPKVEAKEPPVPVQKVTDSLHPEPRQVAFWIMKMPRRRTQPDVQDGGRWLIEKRHRMQAIRDGLRGGAREDSLEDGVHIPQHAKLPVRKTHFLYILRPSQQL

SEQ ID NO: 1439 - DNA, 31516 bp, Homo sapiens
tgaaagcggaaaccccagcgtcagggcagtgcctgcccagccccctaccttccagctaagcaacccccctgcaaaaccctcagcccccaggtacttgatctgatgcttcccgtatccccattcagcagcagctccccagtgaccttccttctcttccagtctagatcccacacagcctgtcactgcactcttttttttttttttgagctggagtctcgctctattgcccaggctggagtacagtggcacaatcttggctcaatgcaacctctgcctcctgggttcaagtgattctcctgcctcaccctcctgagtagctgggactacaggtgcctgccaccacgcccagctaattgttttttgtttttttttttttggtgtttttagtagagacggggtttcaccatgttggccagaatggtctcgatctcctgacctcgtgatccacccgcctcagcctcccaaagtgctgggattacaggcgtgagccaccacactcggccctcactacactctttctctgacaataccgtcaacactcctgcctcaccgtcctgcagccacactacccaaccaatgcctagcctggatccatcagttcctctctgggctgagaaatacacccctagcccgccacggtggctcacgcctgtaatcccagcactttgggaggtccaggcagggggatcacttgagcccaggagttcaagaccaacctgggcaacatagcaagacccccgtctctacaaaaatcaaaaaattagccaggtgtggtggcacatgcctgtagtctcagctactcaggaggctgaggcaagaagattgcttgaacccaggaggctgaggctgcagtgagccatgattgtgccaccgcaccccagcttaggcaacagaagaatatcctgtataaaaaaagaaaaaaaaaaaaaagcacttcccatcatcttctggggcccatttctattcttgtaggctacaaacatatcccgtcacctcaaggctctctcagaactgaaaaggacactcccacttacctctgggaaacattttcttccttctgaacctaagagaagattaattataacctctgttctaccctcaggtccaagaaccacctaatagaggctgggcacggtggctcacgcctgtaatcctagcatttggggaggctgaggcgggtggatcacgaggtcaggagttcaagaccagcctggccaacgtggtgaaaacccatctctactaaaaatacaaaaattagccgtgcatagaggcaggcgcctatagtcccagctactcgggaggctgaggcaggagaactgcttgaactcaggaagcggaggttgcagtgagccgagatcgcaccactgtactccatccagcctgggcaacggagcaagactccatgtcaataaatacatacatacatgcatacatacatacatacatacatacataaatggggggacacaggagctagaaggtggagtgagaaaggtctctgtgggagtgtgagggtggggggcaggtgctgagccaggacacatagtactcactctggaacattccaggggggcccagatcctccagaccaaaactggaaaagctcagaggcctggataggacacaaagaaaaatggttggtcagtcccctgtggacagctgcagccccatccatccccctttgcccccacgtcccacaatccccaacctggaccacctgaggaccagtgggacccagtttggcctgcagagaaggcgcggagatgagctgggcagaggacatggttgccattgtctggaaagccttgtccttggaaacctggtcctggaggaggaggcggaagttcatgtgagaggggcatctcagtcaacatggcaagagggggatggtgccagggtggggtgaagacggggaggtgcagaggtggggagtcaaggcaaagggttagtggccgggcatggtggctcacgcctgtaatcccagcactctgggagccggaggcgggcagatcacttgaggtcaggagttcagtatcagcctggccaatatggtgaaaccctgtctctactaaaaatacaaaaactagccaggtgtggtggtgcacacgcataatcccagctactagggaagctagggcacaacaatcactggaacccaggaggcagaggttgcagtgagtggagatcgtgcccctgcatccagcttaggcgacagagcaagaccctgtctccaaaaagaaaaaaaaaggcaaaggcttgggttgggggagggttgaacctctccccacagccctctgcccctcctcagggacagggcactagtttggagtgagcgtgggtgggaggatgggcagaggaacttaccacgttcagagcctgcccgtgggggtgggggagggtgccaaaggaggaaagaaaacatgacttaggaagtacggcccggactcccccacctccctgccctacccgcccgcacagccccgccaccctgagctgagcagtgccaagggatggatgcgcaacaggaagtggaggtggccagccctggaggggaaaaggggctccctgcccagaaagacagtgatgggggtttctagaacaaggaaacccagaaggttcccagatgtccaggagacaggaaatgagaatttcagagccagcgggaagacaaggtaaatgtttcctaatccagacagaacagacagggaacacagaaggtcgagaacagaccggaagggaagggtttcagacctagagagaaagaaagggaaagctgctggatacaaaaaaaaaaaaaaaaaaaaaaaccagaagcgaccgtccccaagtccagaaaaagagacagaaaaacccccacacacccagaagggggagaaaatgagggtctccggccaacaggaaccaggaaatccaaaggatgaggagaaggaaatgaatgaggaatctccaccaggaaatgaagatttctgggcacaaagagtaggcaggtcatgcaaaggtcaggaaatgggaaaacaaaccagcggagatgaagaggaggccttcacagcacaagagggggaagatatgagaccgccaggaagagggaaaggagggacaggagcagagggaagggagggggacaggaacagtggtcaagggaggggaccgacggcccatccttcctgctgtcctgagcaaaaccttcagcctcctccatgccatcgctccctgcccagggtctcagcaaccgcaccaccatccctatgcatctccctttgtgggccactgactccccaccctggatgactgcaccccccgccctgaccacagaggtccctcacctgaggtctctgtccccctctgtctctgggtctctgtctccctctgtctctgggtctctgtccccctctgtctatgggtctctgtccctctctctctgggtctctgtcctcctctctttctgggtctctgtccctctctctctgggtcttggtcccctcccccaagtctctgtccccctctccctgggtctctgtccctttctctctgggtctcagtcctccccgctctaagtctctgtccccctctccctgggtctctgtccctctctttctgggtctcggtcccccacccccagtctctgtccccctctcaggatgtctgcattggtccctaccttcaacttggactggatttcccttgatttccttcgggccaaaacctggatgtgactagaaacctggaaggatcaacggagaagcagattcaggccacagccaccgcccctgtgttcactaccccttctctccctccaggtgcctcactgagctgctggaccatgaaaggtgaaaaacacactgaagatgagagccatctcgggagcacccgaacacagatgtccataaaggagctcgtgaacaccacggaccctcccgggacccatcccatccaggcctccttcccctccaccatgctctctctgtggctactctgggtctaacacaaccactagaaaaactatccccaaacaggcacagtgagagcacacgaacagacatgctgatacagttcggacattcgtcccttccaaatttcatattgaaatgccatctccagtgttggaggtgaggcctggtgggaggtattggatcatggaggtgaacccctcatgaatggctttgcaccatctccttgatgatgagtgacttctcactcagttcacacaagatctggttgtttaggccaggtgtggtggctcacgcctgtaatcccaacactttgggaggcctagatgggcagatcactggaggtcaggagttcaagaccagcctggccaacatggtgaaaccctgtctctactaaaaacacaaaaattagggctgggctcagtggctcagctgtaatcccagcactttgggaggccgaggcgggtggatcacctgaggtcaggagttcgagaccagcctgcccagcatggcgataccctacttctactaaacatacaaaaaattagccaggtgtggtggtgcgcgcctgtagtcccagctactcaggaggctgaagcaagagaatcgcttgaacccgggaggcggggcttccagtgagccaagatcacgccactgcactccagcctgggcaacagagcgagactccgtctcaaaaaaatatttaaaaaatgaaaaaataaaaatttgccagatgtggaggcgcatgcttgtaatcccagatacttggaaggctgaggcagcagaatcgcttgaacccggaaggcggaggctgcagtgagctgagatcacggcactgcactccagcttgggagacacagtgacttttctctcaaaaacaacaacaacaaaaagatctgggtgtttaaaaagagtctgggacctctgtctttcttctgttgctcccactttccatgtgccaggcctgctcccactaccccctccgccatgattggaggcttcctgaggcctcaccaggagcagatgccagctccatgcttcctggacagcctgcagaactgtgagccaaaataaagctcttttctttctttctttctttttttttttttttgaggtggagtctggctctgtcaccaggctggagtgcagtagcacgatcttggctcactgcaacctccgcctcccgggttcaagcgattttcgtgcctcagcctcccgagtagctgggattatgggcacacactgccactcccagctaatttttgtatttttagtagagacggggtttcaccatgttggtcaggatggtctcgatctcctgacctcctgatccgctcacctaaagtgctgggataacaggcatgagccactggcccagcctaaagctctttatcaattatccagccttgccaggcacagtagctcacgcctgtaatcccagcaatcccagcactttggggggctgaggtgagtggatcacctgaggtcaggagttcgagaccagcctggacaacatggtgaaaccccatctctactaaaaatacaaaattacccaggcatggtagtgcatgtctgtaatccctgctactcgggaggctgagacaggagaattgcttgaacccgggaggcagaggttgcagtgagccaagatcgcgccactgcactccggcctgggcaacagagctagactccatttcaaaaaataaacaaatacataaataacccagcctcgggtaattctttatagcaatacaaacggactaacacacatgccgagaagacagatgaacgcacaggaagcagcttcttccttgaacctgaacctgcccatgcgaggatgaccctaagaagaccggcccatcccagacagaagcccacaagtccattccgagacctgttttcgagttcgggtcttccccgttctcagcttgatgtagcgggcgatcagttcattccgacctgaagattcaaagacggaacagagttagttagactttcaacagaacttccccacagcatggacaccagggaagaagaaagcagcatgggtccccaaaggtctgcagcaagtgggctgccggtcccctcagctacgtggaagccagactgcttgggttcaaatcccagctccatcacgcactggctctgtgcgaccataagcaaatcacttaacctagctgtgcctcagtttcctcatctgtgcaaatggtgatgctagctcctacttcagagtgctccataaaccttggttactgtcattattcatcagtgggggccagggcaaaagacagaagtagactcaccatacatcttgccttcatcagacaaaattattttccggcggccgcagggtggatagatggccagggcctcctggaagctctgctcaatgtctgggctccacaccccctctgcatccgggcccccgtcacccccagccccctcactgccgccggtaccctcctcactgccttcctcactgcccgtccagccgctgccatcgtccagggcggccccagcccggggttcccccatctgggcctggaggaacacagaactcagcaagcttcccccaaaccccaccctcaagggacttgaagctgagagggctgggactctggaccactgggtctgagggaggaggggctggggacctggactcctgggtctgagggaagaggagctggggggtattcctgggtctgagggaggaggatctggggcctgaactcctgagtctgagggaggaggggctggggcccggactcctaggactgagggaggaggatctggggcctggactcctgggtctgagggagcgggggctggaggcctggactcctgggtgtgagggagaaggggctggggtctggactcctgagtctgagggaggagaaggagctggatttcttggaaagctgaggatgggagtgttctcagagtttccagaggaactcaattgtgatgaagtcacaatgattaccctagagtaatgccgagggccatgaaggctaaaggttcgggtatgaattacgggttttaaagaagacaggaggcaaaagttagtggtggggaaggaaggtgtgggtgaaacttcccctgtcccaccccaagaacaggtggtaagatgtgagcagcagctgccagaaaagaagaggggccaagcaagactgaggggaggtctagagagagggggacagagacccagagagggagggggacagagacccagagaggggatggggacagagaccagcaagggggggggacagagacccagagagagaaggggacagagaccagagagagagggggacagagaccagtgaggtggggatagagacccagagacagagggggacagagaccagagagagaaggggacagagacccagtgaagggggggacagagaccagtgacggaggggacagagacccagagagagagggggacagagaccagagggagggggggacagagaccagagggagggggggacagagaccagagagggggacagagacccagagagagggacagagacccaaaaagagagggagacagagacccagggagagggggagacagagaccagaaagagggggacagagaccgggggggggggacagggaccagagagaggggtccagaggcccagagagggagacagagacccagagagagagggtgacagagacccagagagagggggacagagacccagagagagagggacagagacccagagagagaggggaccagagacccagagagagggggacacagactcagagagagggggacagaggctcagagagagggcaacagagacccagagaaagggagacggagacctagaaagggcagggacagagactcagggcagcagctgaggccgagaccaggagagacccacagaaccacaagctgggggacaggggcgccctgccatcagaagagccagaacaaagggcccaggcgtcccctcccccagcttcccacaacccccatcaggggaggggcttgcctgtcagggcgactcccctccggcaccgggccccgcccctcccctcccccgtgcgccgtgggctctgatccaactcaagttcccagtgactttccggaggccgggaacagggaaaactttttccaatacagtcagatcccgcctccccggaggctccatgtcctccacagctttcccaggaccccagagtccaggcccctattcccctcctcccgccgaccatagcagacaaagaccccagccaagcccagtggcgctgcggcgttcaggacccccgtaggccaaaatcccagcccagcccttccccatgtggccagacaaagggacggtggagccgggtaagaaaggtccccctaatttcccgccccagaccctaaacctccaaagaggcaagacttaagatccagaaagccccgtaacctcccctcggccaccccagaggccctcccttctccgtaagaaggaccaaatgccccccagattacacaaggggtccttctcactccaaagtgacaccgccgcagacgcacgccccacaccccgccagcgcccttggcccgcacccgctcctgcgcgcacgcccaaactcagacccagccgcaggcaccctaactccggccagagttcccactcctcactgaggctcggtcacgggagcaaattcgggcccccgggcaaaaagagggctgcgaaccattcagagacggtcccgcaaacgcacgcctcacctcctaagaagcaactccccaccccaactcacacaccccaaagcaggatccccgactcccgccggcgccttcctacctcccggcctggggctggggagccgcgggcgggcggggcgctgcgagggagaaagttgccgggagctttgtttgggaaaagtgggagggaccggaggggggggcgggcccggccggcggacagcgggaagggggatccgacggtgacagtttggggaaggatttttgctttgggagagattagtctatctcggggctggtaggaactcaggatttgggtgcttgggaaaggagggggattgggggttcggactccaagtcggagggaaaaggctgataggagccagaaacccctgatctgagggaggagaggctgggggctgggactcctgggtctgggggctgggactcctgggtctgggagaggaagcggctggagagagatatgggctcctaggtctgagaggggacggggctaggcgcctggaatcccggctaccctcgtgtttgtgtattgggggtgcggaagtgatacgaatacaaagagtctttactgttaagccctgaggttttttttctttttttctgtttggtttttggtttttttgttttttgttttttttgtttttttttttttttgaggattggggtctggggatgggttttgactgattcctatgacgacctggtttccttgtgacctcaccacagttaagagtcgtgggcaggaccaccgggagtttattggaggcccacgtaggtgcagattcctcatctacaggcgctagtggactggagacggctggcggctgtcccgggacggggaagagagctttggtgcctgagggaagatggcttagggcccggtcccttaagggtgaaaggctgcgtgttcaaaattacgggactagagggggctggagtccggacctgaggtcctcagggaaaaggaagtctgattctgggttccttggaagatgaaatataagactggatttagggtttccggagacaacgggactttttagtggagcgggagcgggaaaaccagaagggacacggagaaaaggttccgaaacagatacacaattagagtgagagctaaaagggatgcttgtactccggtgtctccagtaggaggagcctaggactggaacttggggtgatgagggcaagatctgggacgcaggggcgtggtccagtgcaggggcgtggcccagtgcaggggcgtggctttcagccaaggggcgtggccattgcgattgggcgggactccgaaacgagggccgcaatcagagaacaccgccaggacttccaggacttggtctccaggactgaggtcaactgacgggggcgtggtctgactgtgtgggcgtggccagggaatgaactcacggctctggcttaaggggtgtggtgaacgaaggatggggcgtggctctgtcacgaagggcgtggtcatggagtagaggcccgggctcctgggtgaggccggcaagtttggagcgtggtcagacaataggggcgtggctacggctcgcggagcgcaaccaacgctctagaccagacctgggctcgagaccataactgtttggctttaacagtacgtgggcggccggaatccgggagtccggtgacccgggctgtggtctagcataaaggcggagcccagaagaaggggcggggtatgggagaaggtgaggattgagatctggtggtgaacgtgggcgaaagtgaggaaaagaccattggatgaggccgggtgctgtggcttacgcctgcaatcccaacactttgggaggcccaggtgggcggatcgcttgagatcaggagttcgagaccagcctgggcaatatgtcgaaaccctgtctctacaaaaaatacaaaaattagccgggcgtggaggcgcgcgcctgtggtcccagctacttcggggggctgaggtgggagaatcacctgagcccggggaggtcgaggctgcagtgagccgtgattgtgccactgtactccagcctggactacagagtctcggtctcaaaaaaaaaaaaaaaaaagcatatgagacagaacccagaagagccagacctgggagaagacggggcctggcaaggtggagggtgtgggagtagaagaaagaagcagtgggggaaatgagcgcggtgtgggagttgcctgaactggggaggcgacctgggcaaggtgctggagaggggcgtcttgggtgggggcgtggccactgtgcggggctctgaccccgacccttgccacagcctccccacctgcccccgcaaggcggcatctgctggtcctgctgctgctcctctctaccctggtgatcccctccgctgcagctcctatccatgatgctgacgcccaagagagctccttgggtctcacaggcctccagagcctactccaaggcttcagccgacttttcctgaaagtaagcgatggcggggggatgggggaagaagtactgagaagaggttcagggacacagagtgggagatggttcagggccaggcagggggacagacaggatgagagggcaacagggagaccaagagataggaagagggaagggactgggcccaggctataatcacagcactttgggaggctgaggcagaaggatcattggagcccagtacttggagaccagcctgggtaacatagtgagaccctcatctgtacaaaaaaatataaaaaatagttgcaggtacatgcgcctataatcccagctgcttgggaggctgaggcagaaggatcccttgagcccaggaggtcgaggctgcagtaagccatgatagcaccactgcactccagcctggatgacagaacaaggagaccctgtctctaaacaaataaatatatacgtgcataaataagagaggaaaggtaacaggcaaagagagaggagatgggacagagacaagagactggggaaagagacaggaggagagggggatggggacagaagaggaacagggatagtaaggcaatgggactgagaatagagagagaattcatgggggatggaggccggaggttaggccctaagtatcagagggcagaaagtaaaggggatgggagggacttggggcaaggcctcgggagcatcctagcagggctgcagaaggggctgtactgaggagatgtgaggtccagcagctcaccagtccctcctccggccccagggtaacctgcttcggggcatagacagcttattctctgcccccatggacttccggggcctccctgggaactaccacaaagaggagaaccaggagcaccagctggggaacaacaccctctccagccacctccagatcgacaaggtgcctatgcagggaagcccttcctgaagtccccttgggatccctccatcccgccatccctcgtgctgcagtatctgttgggagggaaggagggcggaggaggaaagcaggtttgctctcactctctcatcggatcctcacagaggaccgacaacaagacaggagaggtgctgatctccgagaatgtggtggcatccattcaaccagcggaggggagcttcgagggtgatttgaaggttaggacgtgccccgccgtcaaagtgtccaggcccaaacattttctttttttcttttttaaagaagagtctcactctgtcacccaggctggagtgcagtggcacgatcttggctcactgcaacctccgcctccgaagttcaggcaattctcctgtctcaagctccttggtagctgggattacaggcacccgccaccacgcccggctaattttttgtatttttttagtagagacagggtttctccatgttggtcaggctggtcttgaactcctgacctcaagtgatctgcccatcttggccttccaaagtgctgggattacaggcatgagccaccatgcctggtgaggccctaacattttctgtagtttaggaggacaagaagaggaactgaccctcctactcctctgtgtggaacttcctccttctgagcctcagttttgccatctctcaagtggggcaatccaactgtcagaaatgagatttttgacctcagaatacatctgcaagggtttagtagaccctagagggttttgtatcaaagtggttttctttttttttttaactacataatagtcaatcaaagtgtttctatgagcaccaaaatgttttataaaccaagaagggtttttaattctaagtgcttggaaagcttcaccctcataaaccccaaattgtgtttttgtctcaaagtaagtgctctgcaaacttcagagtatttttcaatctatcccaaagtggttggtaaacctctccattataaactccaaaatgtttttgttgttattgtggttttgatttttggggttttttttgtttgtttttttggtttttttttttgagaatggagtcttgctctgttatccaggctggagtacagtggcacaatctcagctcactgcaacctccaactcccagactcaaatgatcctcccacctcagcctccggaatagctggaactacaggcgcggaccaccacacccagctaatttttctatttttagtagagacggggtttcgccatgtttcccaggctggtctcgaactcctgagctcaggcaatccgcccgcctctgcctcccaaagtactaggattatagacatgagccaccacacctggcccaaaatgtgattttcttcttctttttttgttttttttgagatggagtttcgctctgttgcccaggctagagtgcaatggcacaatctcagctcactgcaacctccgccactgaggttcaagtgattctccagccctagcctcccaagtagatgggactacaagtacgtgccaccacgtccagctaatttttgaatttttagtgtagacagggtttcgccatgttggccatgttggccaggctggtctcgaactcctgacctcagctgatccacctgcctcggcctcccaaagtgctgggattataggcatgagctactgcgcctggcccaaaatgtgatttttaataccaaagagctgtatgaatgctaaatgcgttgtgtatttcacctttggtaaacttttttttttttttttttggagacgaagtctcgctcgtcccccaggctggagtgcaatggtgcgatctcagctcactgcaacctccatctcccaggttcaagtgattctcctgcctcagcctcctgtgtagctgggattacaggtgactgccaccacacctgactaatttttctatttttagagagacaaggtttcatcatgttggccagactgctcttgaactcctgacctcaggtgatccaactgccttggcctcccaaggtgctgggattataggcgtgagccaccatgcctggccaggccacctttggtaaacttctacaagtgattctaattatgaagtgctttgcaaaatcagggtatttttaatcctgaaaagttttaagaaacccaaagagcttgatacatccatatgatacccacgtacacccatgcaatatcttcattttaaaaatgtttatttaaaattttattttaaaaatttcaggacaggcacagtggcttacacctataatcctagcaatttgggaggctgaggcaggaggatgacttgagcccacgagtttgagatcaccctgggcaatagagggagtcttcatctctacaaaaaaatttaaaaagtaggccaggcatgctggcttacgcctgtaatcctagcaatttgggaggccaaggcaggcagattgcctgagctcaggagttcgagaccagcctgggcaacacggtgaaaccctgtctctactaaaatacgaaaaattagccgggcatggcagcctgcacctgtagtcccagctactctggaggctgaggtaaaagaattgtttgaacccgggaggcagaggttgcagtgagccaagatcatgtcactgcactccagcctgggggacagagtgagactctgtctccaaaaaaaaaaaaaaaatcaaaaaagtagccaggtgtggtggtgtgtgctgtggttccagctacccagaagcctgaggtgggaggattgtttgagacgaggaggttgagtctaaagtgggcccagatcatgccactgcactctagcctgggcaacagagtgagactctgtctcaaaaaataaataaataaataaataaataaaatttcaagactacagaaaagttttttttaaaaaacatactttattattttggaaatggagtctccctctgtcacccagactggagtgtagtggtgccatcttggctcacagcaacctccaccttctaggttgtggaaagtaaaaaagtttctctttaaagtttttattaaataataaatcacaagtgttagaaataatatttttaattaactttttttaagcctctttgctttgtgttagtaactcttttttaaaccatatcttatgtagttgttagatataaggaaataagtaccttctgtgtccttgtacgttaaccaagatatttggtctcgacgtgctcaagcatgtcccagctcacagcttatgccctttccttatttggaaatgttattacttctccaagtcttttggcaagcaacttcctcttttcctttgttctccattgcctttacctatttaagaaagttttttaagttgttagccaattgggtttagcttagactgtgaggtccagctccaaccaatggagacaggacacagcagtaaggacccaatgcataagggataaatattcctgcctttctttgttcattgtgctctcctggcaggattgctgatgggcagcaccctttctacagaaagtaaaattgccttgctgagaaaactttttgtctgaatgctaatttttccttgcgacaccaagaaacaagcattttgattctaacacaggttcaagtgattctcctgcctcagcctcccaaagagcagggataacaggcacgcactacaatatccagctaatttttttttgtttgttttttgttttttgtatttttagtagcgatgaggttttgctatgttggccaggctggtcttgaattcctgactttgggtgatccacccacctcggcctcccaaagtgctgggattacaggcaagagaagtttttcttaaaatagtacaacagattttaggctcttctgtatctgcccaccgagctactctgttcctggcttagagaaccaggagaaggggaaggggaatcacctgccacatgctggaggttggagcctgtggcaccatggcttgcctcactgcagttggtggtggcaacagaggctgcagtgtggccagagtggcttttctggctttgcccgcccagccactctgagaaaggctggaggagaaagtgaaggaggagtcacctgtggtgaggtggagtttggagcttgcagatggcacggctctgtggctcacctcctacagttgtggcggtgacagcgagggagacttcagcctgactggagtagaagggtgctcgtgaaggctagagtattgcctccaagatgcagcagtggatactcaggtttcaggagactccactgtccatggcgaatccatggtctgccagcgcagttttagagagagaatgtgccaccgcaggtgtcatcctcatgtgcaccctggcaggtagccatctgaagatttcaaggacaacctggcaggggagcagaccagcgacacttcctctgaacaggttcttgctgttcacttgacagactcagcaactcaggcaagtgttcacatggaagatatcctggaaggataccaagccagtgaaagctcagatgaaaatgccccatggctttggaaggccaatgaatgtgccaaggaaaaaggtgccatggaggatcctctggaagacctcgccaatgaaatttcagattaggacaccccactggatttgaaggccaaagaacgtgccaaggaaaaagttcccatggaggataccctggtggaagaccttggaaacgaaagctcagataaggatgcctcactggacttgaaggttgacaaacgcatgaaagaaaaagttcccacagaggataccctggtgaaagaccttgccaatgaaagctcagatgaggacgctctactggattgaaggctgatgaattcaccaaggaaaagttcccacggaggataccctggtggaagaccttgccaacaaaagctcagatggggatgttttgctaaatttaaaggctgacaaatgagccaaggaaaaagttcccatggaggataccctggtggaagacctcaccaacgaaagctcacatgaggatgctccactggatctgaatgccgacaaatgtgccaaggaaaaagttcccatagataatccagtgaaagaatttgccaacaacatcaaggaaaaggaggccccatgtaatgtgaaggcaccctagggagtccaggtaaatgatttcaaggatgacctggcggggatggtgatcagtgaaaagtccccagaagcagccctatctcttcacagggcaaaatgagatgccaagaaaaaagattgcttcgccattcttgtagcagagcttcctgaagagatgtcctcagggcaagtgctggccgttgtcaccgtgaaaggcatcaagaaaaatggtggctctgaggacagcttttctaaaaccagtaatgacaaagactcttcctgtagtggagacactcaagcttctggagcagatatggaagagtccaatcatgcagatgaccatcagcatatgccaacaagtactctcccagcacctgcagaaaaaacaatagagacaaagcctgaaaaggcagaagaaatgtaacccagtgagttcaaggaggatgaggatgctgaagagcctgacctgacctgttgtgacctttgttttttatgctagaagtccctacagattttttgaacacctggaagggccgggtcacaagacctcaccctggcccagcaaccatctggaccgtgagagttttggggattttgctactctctctggacttttacattctcttaattttttaaaaaatattctttctttaacctgttttaagatgcaagctgtcattgcgtcatcatagttacattttattactcaaataatttttcaattgttttactagttttttttggatctttgtccactggttttagagtttttgtaattttgataaatgatcttttatgctttgtatcattttcttaatgacttaccttagtttttaacaaatccatggtacagtaagttatattaagacatagtatttttatgtttttttaaattatactttgggttctggggtacatgtgcagacatgcagttttgttgcataggtgcatgtaccatggtggtttgctgtacccatcagcccgtcacctgcattgggtgtttctcctgatgctatccctcccctgaccccccaccccccaccgacaggtcctggtgtgtgatgtttcccttcctgtgtccatgtgttctcattgttcagctcccacttgagtgataacatgcagtattttgttttctactcttgtgttggtttgctgagaatgatggtttccagcttcatccatgtccctgcaaaggacattaactcatccttttctgtggccgaatagtattccatggtgtatatgtgccatgttttctttatctagtctatcactgatggacaattgggttggttccaattctttgctattgtgaatagtgccataataaacatgcatgtgcctgtgtctttatggtaaaaaaaaatagtataataaatatccctatagtctcttttccataaaccaaaatttcttaaggttggcatcattggcatgtggggctggataatctttattgtgggagctgccctgtgcactgtaggatatttgataacatccctgggctctatccactagagagaagttgcctcctgccaggcacagtggctcatacccgtagtcccagcactttgggaggcagagacgggcggatcatgaggtcaggagttcgagaccagcctggctaacgtagcgaaaccccgtctactaaaaatacaaaatatggggccaggcacagtggctcacacctgtaatcccagcactttgggagaccgaggcaggcagatcatgagatcaggatatcaagaccatcctggctaatgcggtgaaatcccgtctctagtaaaaatacaaaaaaattagccaggcatggtggcaggcgcctgtagtcccagctactcagaaggctgaggcaggagaatggcgtgaacccgggaggtggagcttgcagtgagccgagatcgtgccactgcactccagcctgggcgacagagcgagactccgtctcaaaaaaaaaaaaaaaatacaaagtatggccaggagtggtggcttacacctataatcccagcactttgggaggccgaggcgggcagatcacctgaggtcaggagttcgagaccaccctgaccaacatggagaaaccccgtctctactaaaaatacaaaattagccgggcatggtggcacatgtctgtaatcccagctactcaggaggctgaagcaggaaaatcgtttgaacccagaaggtggaggtcgcggtgagcgaagatagcaccattgcactacagcctgggcaacaagagcgaaactccatctcaaaaaataaataaataaataggctgggcatggtggctcacgcctgtaatcccagcactttgggaggccaaggcaggtggatcacctgaggtcaggaggttgagaccaacctggccaacatggtgaaaccccgtctctactaaaaatgcaaaaattagctggcatggtgccatgcccctgtaatcccagctactctggaggctgtggtgggagaatcgcttgaacccaggaggcagaggctgcagtgagccgagattgtgccactgcactccagcctgggctacagagtgagactccatctcaaaaaaaaaaaaaaaagaacacagtcatgttggattagggcccaacctaatgacctcatcttcaccaattatatcttcaatgaccctagttccaaataaggccacattctgaggtattacaggttagaatttcaaaatatgaatttggggaggaaacaatatggttgtttgttcgtttgttttttaagcctgggtcttgctctgttgcccaggctagagtgcaatggcacaatcttgactcactgcagcctctgcctcccaggttcaagtgattctcctgccttagcctcccaagtagctgggattacatgagcgcgccagcacgcccagctaattttcatatttttagtagagacaggattttgtcatgctgtccaggatggtctcaaactcctgacctcaagtgatctgcccacctcagcctcgcaaagtgctggattacacacatgagccaccgcgtccagccaggaggaaacaatttaacacataacaatctcctgcgcggcttctcagacctcatcttactaaaaggcagactgattcagcaggtctgagtggggtgggacctattaatttgcatacctaacaacagcagcccaccctttgaattgcaaggaccaaacagacactcagtccatattcaaactttctccctcaactcaaagctgtccttgaaagctttattttttttttttcccttgagatggagtctcgctctgtcacccaggctggagtgcagtggtgcgatctcggctcactgcaagctccgcctcctgggttcatgccaatctcctgcctcagcctcccgagtagctgggactacaggcgcccgcaaccatgcccggctaaatttttttgtatttttagtagagacagggtttcaccgtgttagccaggatggtctcgatctcctgacctcgtgatccgccagcctcggcctcccacagtgctgggattacaggcatgagccactgcacctggccccttgaaagcttttgattcaggatcaatgaaggatcacacattgcatttatggtcatgagtcttcggtaaacccaagagcttttagtcctaaagtgctttgtacatttcaaactgctatcctctaaacctcagagaggatttaatcctaaagtgctctagaatcccaacaggcattataatccctgaagtgctctattacctcccttttgaaagcccccaaacaaattttccaatcccaaagcattctgtaaacctcagagtatttttaatccttaagtgtaaacccaagtgctttgtaaacctcaaacagggcttttgaacccacaaagcatcctgtcatctgcaaagtgggctgaataggtcagtggggactgaccatcctggggtgctgtttggagtatgagagggtctccttgttcttcctccccaggtacccaggatggaggagaaggaggccctggtacccatccagaaggccacggacagcttccacacagaactccatccccgggtggccttctggatcattaagctgccacggcggaggtcccaccaggatgccctggagggcggccactggctcagcgagaagcgacaccgcctgcaggccatccgggatggactccgcaaggggacccacaaggacgtcctagaagaggggaccgagagctcctcccactccaggctgtccccccgaaagacccacttactgtacatcctcaggccctctcggcagctgtaggggtggggaccggggagcacctgcctgtagcccccatcagaccctgccccaagcaccatatggaaataaagttctttcttacatctaacaacaccatctcctttcactatttatccccaaccgcctgccaaccaggccatggcaaaggcccccagtcccagctctgagcatgagagctggctgtgctagctcttgcctaagtctcccaggcttggttttctcattcaggcattgtctgtgctgtagccccatctgtccactcagcacccaaccctgtcacctccagccctgtctgcactcccaactctcagctatttttttttgctttttttttttttttgagaacagggtcccactctgttacccaggctggagtgcagtggcacaatcacagctcactgcagccttgacctcccaggctcaggtgatcctctcacctcagcctccccagtagctgggaccacaggtgtgcgccaccacgcccagctaattgttgtattatttaacatagggatctccctgtgttgctcagggtggtcttgaactcctgggctcaagcgatcctcccacctcagcctctcaaagtgctgggattacaggcttgagccactgtgcccggcccccaactctttcactccagtcctctctacttggcccccgtactgttactgccataaaaatgggcacaaacttggcaacttaaaacaacacaaatgcattatttcacatatcatcctggtcagaaatccaggatggctccgctggccctcagctctgggtttcacagggtgtcagccacccgagctctcattgggaggctctgggaagaagctgctttcaagctcattcagattttaagcagaatcgagttcctgggcttgtgggactgaggtccccacgttcttgctggctgtcagctgggggccacccatgcttccacgcttagctccaagaggcctctctccagttactgcaggtggacctgacatcccagagccacagcccagtatcatggcgggactctgacttccccttgtgtcccatctctggtatgccttcctcttctggcagagacagtcctctgctttgaagggctcatgtgattggactggacctaccgggacaacatatttacagttttcaggaattatggggtgatcatctttgggggaccactatccagccccactcaggtccttcccatgtcatctccagcctcgactctgtggtgtccacacccacctatccttgtcttcatcttctcattctctcactaccccctgacggagagactccatctccaacttgctatttctctctctttgtccctctatctgaccctccctgctcaccacctcaaactccctcacttccaggcctgatgccacgtccaaacttggaagctcacagagcttgcctgtggtggtctgtccactttgtccttcctcagagcatttcctgtcccctctgagaatcctccgtcatgacccatcaaggagaaagctgatctgatcctccccagtgctgagtcccatctaggacccggacacggcatgtactctctcccttgaagcccaagctgagcgctggatcaccccatagactcacacactcaggaacccaacagtgagtacaatgaatacaagtcaacttttttttttttttttgagaccgtctcgctctgtcgtccaggctggagtgcagtggcatgatctcagctcactgcagtctctgccaccacccaagttcaagtgattctcatgcctcagcctcccaagtagctgggactacaggtgctcaccaccacgcccagctaatttttgtatttttaatagagatggggttttaccattttggccaggctagtttcaaactcccaacctcgggtgatctgcccgcctcagcctctcaaagtgctgggattacaggcatgagccaccacgcccggccaagtttggctgcttctaaggcctctctccttggcttgaggatggctgctttctcactgtatcctcacattgtgtctttttgttttttttgtttttgagacagagtctcacactctgtcgcccaggctggatggagtgcagtggcgtgatctccaccttccaagttcaagagattcttctgtctcagcctcccaagtagctgggactacatgcacgcgctgtcatgcctggctaatttttgtattttttagtagcgacagggtttcaccatattggccaggctggtcttgaactcctaacctcgtgatccacccacctcggcctcccaaagtgctgggatgacaggcgtgagccactgcacccggcccacattggcttttatttgcaattctagaatagggcagtacctcattctataaagtaaaatgagtgttcccatgagccgagcagagaagggttgtttacgatctcggctcactgcaatctctacctcccgggttcaagcgattctcctgcctcagcctcccgagtagctgggattaaaggctcctgctgccacacccagctaatttttgtattttttgtagagacggggtttcaccatgttggccaggtggtcttgaactactgacctcaagtgatccgcctacctcagcctcccaaagttctgggattacaggcgtgagccaccgcacccagctaatttttgtatttttagtagtgacagggtttcatcatgttgggcaggctggtctcaaactcctgacctcaagtgatgcacccacctcagcctcccaaagtgctgggattacaggcgtgagctactgtgcccggccagggattacatttctttttttttttttttaattttttattacagaacaattattatctgtcatcaaactatcctttcagattcattttgaatacctcctttcttttttatttttctttgagatgggagtctcgctccgtcgcccaggttggagtgcagtggcgccacctcggctcactgcaatctttgcctcccgggttcaagtgattctcctgcctcagcctcctgactcactgggactacaggtgcctgccaccatgcccggctaattttttgtatttttagtagagacaaggtttcaccatgttagccaggatggtctccatctcctgatctcgtgatccgcccacctcggcctcccaaagtgctgggattacaggcatgaaccactgtgcccggcctcaattggtcatttcaaagttactttacttgtggccaggtgtggtggctcacgcctgtaccccagcactttagaaggctgacgcaggtggatcacctgaggtcaggtgttcaagactagcctggccaacacagtgaaaccacgtctctactaaaaatataaaaaattagccgggcatggcggtgggtgcctgtaatcccagctactcgggaggctgaggcagaagaattgcttgaacccaggaggcgaaggttgcagtgagccgagatcacaccactgcactccagcctgggcgacagagcaagactccgtctctaaaaacaaacaaaaaaacaaacaaagttactttacttgtaaaggttaaaacagaggggacttcctcatcatgctagctagaagatgtggctattatctctctctcctgtctcccctaaattctcagaggtcatataacttagtttcagcttgctgacatggaactgtaacatgagtgactccactggtctcttgggcctagtgcaggagctcggtccaaaccaatggcttcctgtaaaatttatttaacaaggcaaatctacagagacagaaagcagattcatggttatgtggggcttcacggaaaggaaggttgagttaggaataatggctaagagatgtagggctttgttttggagtgatgaaaatgttctaaaattaattgtgatgattgtagaactctgtgagtacactgaaaaccactgaattatacactttaaatgggtaaattatgtggtgtgtggatgataactcaataaagctgttaaaacaattagttaattaataattctattaaacagtttaccctgaacaactcagggcttaggggactaaccccctgtgaggtaaaaaatctgaagatcaattttgactccccaaaaacttaatgactaatagcatgctattgaccagaagctttacataaacagtagatgaacacatatattttatgatatatgtttttggggattttttttttttttgatacaggatcttgccctgtcacccagggtggagtgcagtggcacaatcatagctcactccaggctcgacccccctggttcaagcgatcccccctcctcagcctcccaggtaggcaggaccacagataaggctctcacaaccacacctggctaatttttgtatttttagtagagatgagggtttcaccatgttacccaggggtgtctccaattcctaggctcaagcgatcagcccaccttggcctcccaaagttctgggtttacaggcgtgagccaccatgcctggctgtgttatatgtattatatactatattcaaacaataaagtgagctagagaaaagaaaatgttattaaggaaatcagaggaagttaggagagggttaaaaaaaataaaatcgccgggcacggtggctcatgcctgtaaccccagcacttttagaggctgaggcgggaggaccacctgaggtcaggactttgagaccagcctgaccaacatagtgaaaccccatctccactaaaaatacaaaagttagctgggcatggtggtgcatgcctgtaatcccagctacgtgggattgttcaaggatgaactgtataagtcacaatggatctgcttctctgagcaaaccctaaaggataaagcattattcagcttgttgcagtctgccaatctaaaaagggtagtttcctgttgctttaattggaatgtttctggttactgatcttttgagctccttatcacatatttgttagttttttggatttccccttctgtaaattgcctgcttttctgtaaattcttggtcatttttttctgttgggttgttatctttttctttttgatttgtaggagttccttcaatcacctaccttttaatcccttgtcaattttatttttttattttatttattaattttttttgagacggagtctcactctgtcgcccaggctggagtgtagtggtgcgatctcagctcaccacaacctccacctcccagattcaagctattctcctgcctcagcatcccaagtagttgggattataggcatgctccatcacatctggctaatttttgtatttttagtacaaaaatacaaaatctcttggccaggccggtctcaaactcctgacctcaggtgatctgcctgccttggcctcccaaagtgctgggattacaggcatgagccaccacgcccagcccctggtcaattttagacaatgcaaatatcttccgctcgtccatcatctcatctctcatgatcttggcccttgggatccttgatgaatagaaacccttaatactgatgtaatcaaattaatttttttgacttatgattcatccttttgagatccctaaaagaagtcattaatactttcctacattttcttttattaactttatagttttaccttttgcatttagtgctttactagcagctggtctccactttacattattatgttatagaggaggaggggcctgaaagcctctcagtgctcaagatctttgaagacttaactgggcattagctcaattagagaggaagaaagcagtagaggatggggatggaccactatctcctgggcctcgcttcccccaagaaaatccatggacccacccacaaccactacatctcagactatttcagcatcttcctcccagtggcttcacacacctgggtgagacccccaacatctactcagttaccaggtctggtattccctgatatcatcctgattttttgactggaaaaaaagtgttaattcataagactttgggtttttttgggggggcaggggcaggcgatggagtctcactttgtcacccaggctggagtgtagtggtgtgatctcagctcactgcaacctctgcctcctgggctcaggtgatcctcccacctcagcctcctgagtagctgggaccacaagcatatgccaccatgcccggttaatttttataaattttttttgtagaaaggtggtttctccatgttacccaggctgatcttgagctcctgggctcaagcgatctgcctgcctcagcttcccaaagtcctgggattacaggcatgaaccaatgtgcccagacccccaacactattctaagcagtggggattaagcagtgaataaacaatgccccagcatcatgggatttggtgggggagagaaacaataaatatgtatcaagcaatggcaaatgctgtgaagaataaagcaacatgaggcagaaaggaaactctgaggggaccgagctcatcttagatagggtagtctctctgatatatacacagagggaggcactctgatatatacacagagactgaactggggtaatggagcaaatccggtccatggtaaatctggagaaagagactttcaggctgagggaatagcaagtgcaaaggtcctgaggttggaaatggcttggcttgatcaaaaacaaggaggccaaggtggacagagcagttattgatggagataaataggggataagatcacaaaagtagacgtagggtacaggagagcagaccatgcagggtctttggagcgtagtgaggagtttttatgttattctatttaaaatgggaagtgagctaagtgttacaattaaagaagtaacatatatgtatttactgatcaaaaagattatccggacttttgcttgtcactatgatggagtagctagtagctgactaactccccaccaaaaactataaaagctgaatacaagctaggcatgatggttcacacctgtaatcccaacactttggaaggctgaggcaggtggatcacctgaggtcaggagttcaagaccagtctggccaatatggtgaaaccttgtctctactaaaaatacaaaaattagttgggcatggtggcaggcacctgtaatcccagctactcgggagactgaggcataagagtcatttgaacacgggagatggggtttcaccatattagcaaggctgatcttgaactcctgaccttgtaatccacccgtcttggcctcccaaagtgctgggattacaggcatgagccatcgcgcccagccaaggaaattaaattctttccgagggaagataataccatccagtttttatattttaatttaaaaattaccagtcttgccaggaaacaagaccaaatgacagaaaaccaagagaaaaaacatacactagaagtatgtacccaaaggtgatccaggtattacagttctcagatacaggctttcaaataactataattaatatgttccccaaaaatagatgaaaagatggataatttcatcagagaactggaatctaaggaggagggagaatccaatataaattctagagctgaaaaataaattaattgaaataaaaattcagtagattagtcccacatcaggttagacacactggaaaacagatcaatagaaaatatctagattaaattacacagaaatagggtagaaaatacattaaaaacatatgagacatataggtcatggttaaaaggtctaatacatacatactggagtcctagaagagaggaaaaagacaatgaggaggaagcaatactaaagaactcctgggcaagaattttaaaaaactgatgaaagacatcaactcacagatccaaggtgggaggatcgcttgagcctgggaggtggaggttgcagtcagtcaagaatgtgccactgtactccagcctgcgtaacagagtgagaccctgtttccaaaaataaggcagaacgttgataattgctaaagctatgtgttaggtatatacgggttcgttatgtttactttatgtatgtttgagatttttttaatactgtataaagatatttttaagtaactgacactaaatactccaaataaaaggcacagattttctgatctacaactacatgcaacatggttgaatcttatatgacatttaacaaaagaaccagaaacaaaaatgtttctgtatggttttatttattctgaataaaaaaacaaataaagcttatctatgccattagaaattggggtaggccgggcacagtggctcatgcgtgtaatcccagcactttttgggaggctgaggtgggcagatcacctgaggtcaggagttcgagagcagcctggccaacatggtgaaacctcatctctactaaaaatacaaaaattagccagatacggtggcacatggctgtaatcccagctactcagaggctgaggcacgagaatcacttgaacccaggaggcggagtttgcagtaagacaagattgcgccactgcactccagcctgggccacagaaggagactttgtctcaaaaaaaaaaaaaaaaaaagaaagaaaaagaaaagaaattagggtaaaagttacccctaggagagtagggactggaaggagccatgaggaagaatcttggaggcaggtagtatgttgtatcttgatctcggtttagataacacagatgtgttcaatttctgaaaattcataaagcttatcacttatgatctatggactgttctatataaatattacacttcactaagagttttggtaaagtcaaaaatcagcagtcagcataaaacaaaacccaactatatgctgttacaagagacatgccttaaatataagcacacaaaaagatggaaagttacaggatgaaaaagataccctatataaacactaaccaaagaaagctggagaaatctctacatcaaagtagccattaaggcaaaaagcattgctagaagtaaaaaatgacatttcaaggtaataaaggggtcaagtcaccaggaggatataaccattctaaatctgtatgcatttaataatacagcttcaacatatataaagcaaaaatgacagaactgagagatggaaaaatccacagtcattcagtacaagaagcaaacagtgaagatattaaagatttgaacagcatgattgacaaacttgacctgacatagctgacctgcaggatacacactctgttcttttcttttttttttcttttttttttttttttgaaacagagtttcactcttgttgcccatgctggagtccagtggcacaatctcggctcattgcaacctctgcctcccaggttcaagcaattctcctgcctcagcctcctgagtagctgggaagacaggcgtgtaccaccatgcctgactaatttttttttatttttagtagagatggggtttcaccatgttggccaggaatggtctcaaactcccaacctcaggtgatccgcctgcctcagcctcccaaagtgctgggattacaggcgtgagccaccacacctggccttttttttttctttttttttttttgagatgaagtctcgctctgtctggcccaggctgtagtgcagtggcgcgatctcagctcactgtaccctccacctcctgggttcaagcaattctcctgcctcagcctcctgagtagctgggattacaggcacatgccaccacatctggctaattttgtatttttagtataaacgggctttcaccatgttggccaggctggtcttgaactcctgacctcaggtgatccacccaacttggccttccaaagtgctgggattacaggtatgagccaccacgccaagctactcttttcaaatacacatgaagcatttgctaaaatagatgaaatcgtggactataaagcaaatctcaacaaatgtcaaagaaatgaaatcatatagagtatgtttgtatgttttctgactacagtgaattaagtaggaagcaataataaaaagatagcagggggccgggcgcagtggctcacgcctgtaatctcagcactttgggaggctgaggcagaggaatcacaaggtcaagagatcgagatcatcctggccaacatggtgaaaccc

SEQ ID NO: 1440 - DNA, 1216 bp, Homo sapiens
agggccgcaatcagagaacaccgccaggacttccaggacttggtctccaggactgaggtcaactgacgggggcgtggtctgactgtgtgggcgtggccagggaatgaactcacggctctggcttaaggggtgtggtgaacgaaggatggggcgtggctctgtcacgaagggcgtggtcatggagtagaggcccgggctcctgggtgaggccggcaagtttggagcgtggtcagacaataggggcgtggctacggctcgcggagcgcaaccaacgctctagaccagacctgggctcgagaccataactgtttggctttaacagtacgtgggcggccggaatccgggagtccggtgacccgggctgtggtctagcataaaggcggagcccagaagaaggggcggggtatgggagaagcctccccacctgcccccgcaaggcggcatctgctggtcctgctgctgctcctctctaccctggtgatcccctccgctgcagctcctatccatgatgctgacgcccaagagagctccttgggtctcacaggcctccagagcctactccaaggcttcagccgacttttcctgaaaggtaacctgcttcggggcatagacagcttattctctgcccccatggacttccggggcctccctgggaactaccacaaagaggagaaccaggagcaccagctggggaacaacaccctctccagccacctccagatcgacaagaggaccgacaacaagacaggagaggtgctgatctccgagaatgtggtggcatccattcaaccagcggaggggagcttcgagggtgatttgaaggtacccaggatggaggagaaggaggccctggtacccatccagaaggccacggacagcttccacacagaactccatccccgggtggccttctggatcattaagctgccacggcggaggtcccaccaggatgccctggagggcggccactggctcagcgagaagcgacaccgcctgcaggccatccgggatggactccgcaaggggacccacaaggacgtcctagaagaggggaccgagagctcctcccactccaggctgtccccccgaaagacccacttactgtacatcctcaggccctctcggcagctgtaggggtggggaccggggagcacctgcctgtagcccccatcagaccctgccccaagcaccatatggaaataaagttctttcttac

SEQ ID NO: 1441 - protein, 240 aa, Homo sapiens
MGEDPAPARRHLLVLLLLLSTLVIPSAAAPIHDADAQESSLGLTGLQSLLQGFSRLFLKGNLLRGIDSLFSAPMDFRGLPGNYHKEENQEHQLGNNTLSSHLQIDKRTDNKTGEVLISENVVASIQPAEGSFEGDLKVPRMEEKEALVPIQKATDSFHTELHPRVAFWIIKLPRRRSHQDALEGGHWLSEKRHRLQAIRDGLRKGTHKDVLEEGTESSSHSRLSPRKTHLLYILRPSRQL
